(19) United States
(12) Patent Application Publication
(10) Pub. No.: US 2003/0162706 A1
(43) Pub. Date: Aug. 28, 2003

(54) Angiogenesis modulating proteins

(75) Inventors: Kevin Gene Peters, Loveland, OH (US); Larry Joseph Thompson, Anderson, IN (US); Feng Wang, Cincinnati, OH (US); Kenneth Donald Greis, Fort Thomas, KY (US)

Correspondence Address: THE PROCTER & GAMBLE COMPANY, INTELLECTUAL PROPERTY DIVISION, WINTON HILL TECHNICAL CENTER - BOX 161, 6110 CENTER HILL AVENUE, CINCINNATI, OH, 45224, US

(73) Assignee: The Procter & Gamble Company

(21) Appl. No.: 10/316,253

(22) Filed: Dec. 10, 2002

Related U.S. Application Data
(60) Provisional application No. 60/355,295, filed on Feb. 8, 2002.
(60) Provisional application No. 60/391,758, filed on Jun. 26, 2002.

(51) Int. Cl. A61K 39/395; A61K 38/17

(52) U.S. Cl. 514/12

(57) ABSTRACT

Angiogenesis modulating proteins may be useful for treating angiogenesis mediated disorders. Further, these angiogenesis modulating proteins may be useful to screen agents that are, in turn, useful for treating angiogenesis mediated disorders.

### CROSS REFERENCE TO RELATED APPLICATIONS

[0001] This application is related to U.S. Provisional Applications No. 60/355,295 and 60/391,758, filed Feb. 8, 2002 and Jun. 26, 2002, respectively, which are herein incorporated by reference in their entirety.

### FIELD OF INVENTION

[0002] This invention is directed to proteins that are useful in methods for modulating angiogenesis.

### BACKGROUND OF THE INVENTION

[0003] Angiogenesis, the sprouting of new blood vessels from the pre-existing vasculature, plays a crucial role in a wide range of physiological and pathological processes in Nguyen, L. L. et al, Int. Rev. Cytol., 204, 1-48, (2001). It is a complex process that is mediated by communication between the endothelial cells that line blood vessels and their surrounding environment, Glienke, J. et al, Eur. J. Biochem., 267, 2820-2830, (2000). In the early stages of angiogenesis, tissue or tumor cells produce and secrete pro-angiogenic growth factors in response to environmental stimuli such as hypoxia, Bussolino, F., Trends Biochem. Sci., 22, 251-256, (1997). These factors diffuse to nearby endothelial cells and stimulate receptors that lead to the production and secretion of proteases that degrade the surrounding extracellular matrix, Raza, S. L. et al, J. Investig. Dermatol. Symp. Proc., 5, 47-54, (2000); Stetler-Stevenson, W. G., Surg. Oncol. Clin. N. Am., 10, 383-392, (2001). These activated endothelial cells begin to migrate and proliferate into the surrounding tissue toward the source of these growth factors, Bussolino, F., Trends Biochem. Sci., 22, 251-256, (1997). Endothelial cells then stop proliferating and differentiate into tubular structures, which is the first step in the formation of stable, mature blood vessels, Glienke, J. et al, Eur. J. Biochem., 267, 2820-2830, (2000). Subsequently, periendothelial cells, such as pericytes and smooth muscle cells, are recruited to the newly formed vessel in a further step toward vessel maturation.

[0004] Angiogenesis is highly regulated by a delicate balance of naturally occurring pro- and anti-angiogenic factors, Folkman, J., J. Nat. Med., 1, 27-31, (1995). Vascular endothelial growth factor, fibroblast growth factor, and angiopoeitin represent a few of the many potential pro-angiogenic growth factors, Bussolino, F., Trends Biochem. Sci., 22, 251-256, (1997). These ligands bind to their respective receptor tyrosine kinases on the endothelial cell surface and transduce downstream signals that promote cell migration and proliferation, Mustonen, T. et al, J. Cell. Biol., 129, 895-898, (1995). Whereas a number of these regulatory factors have been identified, the molecular mechanisms of this process are still not fully understood.

[0005] There are many disease states driven by persistent unregulated angiogenesis. In such disease states, unregulated angiogenesis can either cause a particular disease directly or exacerbate an existing pathological condition. For example, ocular neovascularization has been implicated as the most common cause of blindness and underlies the pathology of approximately 20 eye diseases. In certain previously existing conditions such as arthritis, newly formed capillary blood vessels invade the joints and destroy cartilage. In diabetes, new capillaries formed in the retina invade the vitreous humor, causing bleeding and blindness.

[0006] Both the growth and metastasis of solid tumors are also angiogenesis-dependent, Folkman, J. Cancer Res., 46, 467-73 (1986); Folkman, J. Nat. Cancer Inst., 82, 4-6 (1989); Folkman et al., “Tumor Angiogenesis,” Chapter 10, 206-32, in The Molecular Basis of Cancer, Mendelsohn et al., eds., W. B. Saunders, (1995). It has been shown, for example, that tumors which enlarge to greater than 2 mm. in diameter must obtain their own blood supply and do so by inducing the growth of new capillary blood vessels. After these new blood vessels become embedded in the tumor, they provide nutrients and growth factors essential for tumor growth as well as a means for tumor cells to enter the circulation and metastasize to distant sites, such as liver, lung or bone, Weidner, New Eng. J. Med., 324, 1, 1-8 (1991). When used as drugs in tumor-bearing animals, natural inhibitors of angiogenesis can prevent the growth of small tumors, O'Reilly et al., Cell, 79, 315-28 (1994). Indeed, in some protocols, the application of such inhibitors leads to tumor regression and dormancy even after cessation of treatment, O'Reilly et al., Cell, 88, 277-85 (1997). Moreover, supplying inhibitors of angiogenesis to certain tumors can potentiate their response to other therapeutic regimens (e.g., chemotherapy) (see, e.g., Teischer et al., Int. J. Cancer, 57, 920-25 (1994)).

[0007] Although many disease states are driven by persistent unregulated angiogenesis, many disease states could be treated by increased angiogenesis. Tissue growth and repair are biologic events wherein cellular proliferation and angiogenesis occur. Thus an important aspect of wound repair is the revascularization of damaged tissue by angiogenesis.

[0008] Impaired tissue healing is a significant problem in health care. Chronic, non-healing wounds are a major cause of prolonged morbidity in the aged human population. This is especially the case in bedridden or diabetic patients who develop severe, non-healing skin ulcers. In many of these cases, the delay in healing is a result of inadequate blood supply either as a result of continuous pressure or of vascular blockage. Poor capillary circulation due to small artery atherosclerosis or venous stasis contribute to the failure to repair damaged tissue. Such tissues are often infected with microorganisms that proliferate unchallenged by the innate defense systems of the body which require well vascularized tissue to effectively eliminate pathogenic organisms. As a result, most therapeutic intervention centers on restoring blood flow to ischemic tissues thereby allowing nutrients and immunological factors access to the site of the wound.

[0009] Atherosclerotic lesions in large vessels can cause tissue ischemia that could be ameliorated by modulating blood vessel growth to supply the affected tissue. For example, atherosclerotic lesions in the coronary arteries cause angina and myocardial infarction that could be prevented if one could restore blood flow by stimulating the growth of collateral arteries. Similarly, atherosclerotic lesions in the large arteries that supply the legs cause ischemia in the skeletal muscle that limits mobility and in some cases necessitates amputation which could also be prevented by improving blood flow with angiogenic therapy.

[0010] Other diseases such as diabetes and hypertension are characterized by a decrease in the number and density of small blood vessels such as arterioles and capillaries. These small blood vessels are critical for the delivery of oxygen and nutrients and any decrease in the number and density of these vessels contributes to the adverse consequences of hypertension and diabetes including claudication, ischemic ulcers, accelerated hypertension, and renal failure. These common disorders and many other less common ailments such as Burgers disease would be ameliorated by increasing the number and density of small blood vessels using angiogenic therapy.

[0011] Thus, there is a continuing need to identify modulators of angiogenesis.

### SUMMARY OF THE INVENTION

[0012] The present invention is based upon the discovery of protein expression profiles using a rat cornea model at various stages of angiogenesis. As such, the present invention identifies and provides proteins that are effective in modulating angiogenesis. To this end, the present invention provides for methods, compositions, and kits comprising a safe and effective amount of an angiogenesis modulating protein (“AMP”) that may be used for the treatment of an angiogenesis mediated disorder.

[0013] One aspect of the invention provides for a method of screening an agent useful for treating an angiogenesis mediated disorder, suitable for high throughput screening, comprising the steps of: (a) exposing an AMP to the agent; and (b) measuring activity of AMP; wherein a modulation in AMP activity indicates the agent is useful for treating the angiogenesis mediated disorder.

[0014] Another aspect of the invention provides for a method of screening an agent useful for treating an angiogenesis mediated disorder comprising the steps of: (a) exposing an AMP to the agent; (b) measuring binding of the agent to the AMP; wherein binding of the agent to the AMP indicates the agent is useful for treating the angiogenesis mediated disorder.

[0015] Another aspect of the invention provides for a method of screening an agent useful for treating an angiogenesis mediated disorder comprising the steps of: (a) exposing an AMP encoding nucleotide sequence to the agent; (b) measuring the binding of the agent to the AMP encoding nucleotide sequence; wherein binding of the agent to the AMP encoding nucleotide sequence indicates the agent is useful for treating the angiogenesis mediated disorder.

[0016] Another aspect of the invention provides for a method of screening an agent useful for treating an angiogenesis mediated disorder, suitable for a cell-based assay, comprising the steps of: (a) exposing a cell to the agent; and (b) measuring expression or activity of AMP in the cell; wherein a modulation in the expression or the activity of AMP indicates the agent is useful for the treatment of the angiogenesis mediated disorder. In one embodiment, the expression is mRNA expression (i.e., transcription). In another embodiment, the expression is protein expression (i.e., translation).

[0017] Another aspect of the invention provides for a method of screening an agent useful for treating an angiogenesis mediated disorder comprising the steps of: (a) exposing a cell to the agent; and (b) measuring the association of the agent and AMP; wherein a modulation in the association of the agent and AMP indicates the agent is useful for the treatment of the angiogenesis mediated disorder.

[0018] One aspect of the invention provides for a pharmaceutical composition comprising: (a) a safe and effective amount of AMP or a nucleotide sequence encoding the same; and (b) a pharmaceutically-acceptable carrier.

[0019] Another aspect of the invention provides for a pharmaceutical composition comprising: (a) a safe and effective amount of an agent that modulates AMP expression or activity; and (b) a pharmaceutically-acceptable carrier.

[0020] One aspect of the invention provides for a method of treating an angiogenesis mediated disorder in a subject in need thereof by administering a safe and effective amount of AMP or a nucleotide sequence encoding the same.

[0021] Another aspect of the invention provides for a method of treating an angiogenesis mediated disorder in a subject in need thereof by administering a safe and effective amount of an agent that modulates AMP expression or activity.

[0022] Another aspect of the invention provides for a method of diagnosing or monitoring status of an angiogenesis mediated disorder in a subject comprising the steps of: (a) obtaining a cell sample from the subject; (b) measuring expression or activity of AMP in the cell; wherein a modulation in the expression or the activity of AMP indicates the diagnoses or status of the angiogenesis mediated disorder in the subject, respectively.

[0023] One aspect of the invention provides for an agent identified by any of the methods of the present invention.

### BRIEF DESCRIPTION OF THE FIGURES

[0024] FIGS. 1-5. Photomicrographs of ink-filled vessels in the rat corneas. Corneas are cauterized for 5 seconds with a silver nitrate applicator stick and harvested at days 0, 2, 4, 7, and 15 post-cautery (FIGS. 1-5, respectively). Animals are perfused with ink prior to harvest to visualize the vasculature. Only the normal limbal vasculature is seen in the Day 0, non-cauterized cornea (FIG. 1). A dense brushwork of new vessels sprouting from the surrounding limbal vessels can be seen in 48 hours (FIG. 2). Vessels continue to elongate toward the site of cautery on Day 4 (FIG. 3). Between Days 6 and 7, regression and remodeling occur as redundant vessels are “pruned” (FIG. 4) until only a few stable, mature vessels remain in the cornea as seen on Day 15 (FIG. 5).

[0025] FIGS. 6-7. Comparison of representative 2-DE (two-dimensional gel electrophoresis) profiles from control and angiogenic rat corneas (FIGS. 6 and 7, respectively). Proteins are solubilized from control and angiogenic (Day 3 post-cautery) rat corneas and separated in the first dimension by IEF (iso-electric focusing) using carrier ampholytes, pH 4-7. Separation in the second dimension is performed using 10% tricine gels followed by polychromatic silver staining. Differentially-expressed proteins are excised from gels and identified by mass spectrometry. All identified proteins are numbered and listed in Table II.

[0026] FIGS. 8-13. Representative 2-DE profiles of rat comeas from a time course study of angiogenesis. Proteins are solubilized from corneas harvested on Days 0, 2, 4, 6, 7, and 15 post-cautery (FIGS. 8-13, respectively). Extracted proteins are separated in the first dimension by EF (iso-electric focusing) using carrier ampholytes, pH 4-7. Separation in the second dimension is performed using 10% tricine gels followed by polychromatic silver staining. Differentially-expressed proteins are excised from gels and identified by mass spectrometry. All identified proteins are numbered and listed in Table III.

### SEQUENCE LISTING DESCRIPTION

[0027] Each of the nucleotide and protein sequences in the sequence listing, along with the corresponding Genbank or Derwent accession number(s) and animal species from which it is cloned, is shown in Table I.

TABLE I

| | | | Genbank | |
|---|---|---|---|---|
| | | | (GB) or | |
| | | | Derwent | |
| | | | (D) | Related |
| | SEQ ID | | Accession | Genbank (GB) |
| | NO: | | No. for | or Derwent |
| Sequence | nucleotide, | | nucleotide | (D) Accession |
| description | amino acid | Species | sequence | Nos. |
| CRP55 | 1, 2 | Rattus | X53363 | 117505 |
| | | Norvegicus | | 55854 |
| | | | | 1089798 |
| | | | | 488840 |
| CRP55 | 3, 4 | Rattus | D78308 | |
| | | Norvegicus | | |
| CRP55 | 5, 6 | Rattus | X79327 | |
| | | Norvegicus | | |
| Keratin | 7, 8 | Mus | U02880 | 7110667 |
| Complex I | | Musculus | | 414539 |
| | | | | 565659 |
| Keratin | 9, 10 | Mus | U08095 | |
| Complex I | | Musculus | | |
| Heat Shock 60 | 11, 12 | Rattus | X53585 | 111757 |
| Precursor | | Norvegicus | | 56380 |
| | | | | 56382 |
| Heat Shock 60 | 13, 14 | Rattus | X54793 | |
| Precursor | | Norvegicus | | |
| Aldehyde | 15, 16 | Rattus | J0367 | 118507 |
| Dehyrogenase | | Norvegicus | | 202832 |
| | | | | 202845 |
| Aldehyde | 17, 18 | Rattus | M23995 | |
| Dehyrogenase | | Norvegicus | | |
| Capping | 19, 20 | Mus | Z93101 | 6680842 |
| Protein | | Musculus | | 1903235 |
| | | | | 500748 |
| | | | | 500746 |
| Capping | 21, 22 | Mus | U10407 | |
| Protein | | Musculus | | |
| Capping | 23, 24 | Mus | U10406 | |
| Protein | | musculus | | |
| Alcohol | 25, 26 | Rattus | X98746 | 627982 |
| Dehydrogenase | | Norvegicus | | 4379399 |
| Heat Shock 70 | 27, 28 | Rattus | L16764 | 631840 |
| | | Norvegicus | | 294567 |
| | | | | 1483577 |
| Heat Shock 70 | 29, 30 | Rattus | Z75029 | |
| | | Norvegicus | | |
| Ribosomal | 31, 32 | Rattus | M57428 | M35864(GB) |
| Protein | | Norvegicus | | 2117822 |
| S6 Kinase | | | | 206839 |
| | | | | 206841 |
| Ribosomal | 33, 34 | Rattus | M58340 | M37777(GB) |
| Protein | | Norvegicus | | |
| S6 Kinase | | | | |
| Serine Protease | 35, 36 | Rattus | X16357 | 92743 |
| Inhibitor I | | Norvegicus | | 57230 |
| | | | | 207041 |
| Serine Protease | 37, 38 | Rattus | M15917 | J02692(GB) |
| Inhibitor I | | Norvegicus | | |
| Hemopexin | 39, 40 | Rattus | M62642 | J05306(GB) |
| Precursor | | Norvegicus | | 123036 |
| | | | | 554442 |
| Serum | 41, 42 | Rattus | V01222 | J00698(GB) |
| Albumin | | Norvegicus | | 113580 |
| Precursor | | | | 55627 |
| Myosin Heavy | 43, 44 | Rattus | X16262 | 92511 |
| Chain | | Norvegicus | | 56650 |
| Calgranulin A | 45, 46 | Rattus | L18891 | 1710812 |
| | | Norvegicus | | 349548 |
| Kallikrein- | 47, | Rattus | M19647 | J02837(GB) |
| binding | 48-80 | Norvegicus | | 92335 |
| Protein | | | | 204999 |
| Precursor | | | | 205010 |
| Kallikrein- | 81, 82 | Rattus | M30282 | |
| binding | | Norvegicus | | |
| Protein | | | | |
| Precursor | | | | |
| α-2-HS | 83, 84 | Rattus | M29758 | 231468 |
| Glycoprotein | | Norvegicus | | 951426 |
| Precursor | | | | 56139 |
| α-2-HS | 85, 86 | Rattus | X63446 | |
| Glycoprotein | | Norvegicus | | |
| Precursor | | | | |
| β-Actin | 87, 88 | Rattus | J00691 | V01217(GB) |
| | | Norvegicus | | 71620 |
| | | | | 55574 |
| Procollagen, | 89, 90 | Mus | Z18271 | 57956 |
| type V1, α1 | | Musculus | | 57955 |
| | | | | 50478 |
| Procollagen, | 91, 92 | Mus | X66405 | |
| type V1, α1 | | Musculus | | |
| Collagen α 3 | 93 | Mus | Z81279 | 4104232 |
| | | Musculus | | 57959 |
| | | | | 3236369 |
| Collagen α 3 | 94, 95 | Mus | AF064749 | |
| | | Musculus | | |
| HSP70 | 96, 97 | Rattus | X77207 | 2119721 |
| | | Norvegicus | | 1814000 |
| Reticulocalbin | 98, 99 | Mus | D13003 | 6677691 |
| | | Musculus | | 220581 |
| Macrophage | 100, 101 | Mus | X54511 | 729023 |
| Capping | | Musculus | | 53017 |
| Protein | | | | 18605628 |
| Macrophage | 102, 103 | Mus | BC023101 | |
| Capping | | Musculus | | |
| Protein | | | | |
| Phosphatidyl | 104, 150 | Rattus | X75253 | 8393910 |
| Ethanolamine | | Norvegicus | | 406291 |
| Binding Protein | | | | 510338 |
| Phosphatidyl | 106, 107 | Rattus | X71873 | |
| Ethanolamine | | Norvigcus | | |
| Binding Protein | | | | |
| Heat Shock 27 | 108, 109 | Rattus | S67755 | 478327 |
| | | Norvegicus | | 544757 |
| α-Crystalline A | 110, 111 | Rattus | U47921 | 7106271 |
| Chain | | Norvegicus | | 1245159 |
| | | | | 1245161 |
| α-Crystalline A | 112, 113 | Rattus | U47922 | |
| Chain | | Norvegicus | | |
| Gelsolin | 114, 115- | Sus Scrofa | M36927 | 121118 |
| Precursor | 133 | | | 1951 |
| | | | | 164471 |
| Gelsolin | 134, 135- | Sus Scrofa | X13871 | |
| Precursor | 153 | | | |
| Crystatin-β | 154, 155 | Rattus | X54737 | 6978715 |
| | | Norvegicus | | 55891 |
| Vitamin D | 156, 157 | Rattus | J05148 | 203941 |
| Binding Protein | | Norvegicus | | 203940 |
| Precursor | | | | 203926 |
| Vitamin D | 158,159 | Rattus | M12450 | |
| Binding Protein | | Norvegicus | | |
| Precursor | | | | |
| Tropomyosin 4 | 160, 161 | Rattus | J02780 | 6981672 |
| | | Norvegicus | | 207503 |
| Tropomyosin | 162, 163 | Rattus | L00372 | M12080(GB) |
| | | Norvegicus | | M14127(GB) |
| | | | | 136073 |
| | | | | 207485 |
| | | | | 207495 |
| Tropomyosin | 164, 165 | Rattus | L00373 | M12080(GB) |
| | | Norvegicus | | M14127(GB) |
| Tropomyosin | 166, 167 | Rattus | L00374 | M12080(GB) |
| | | Norvegicus | | M14127(GB) |
| Tropomyosin | 168, 169- | Rattus | L00375 | M12080(GB) |
| | 172 | Norvegicus | | M14127(GB) |
| Tropomyosin | 173, 174 | Rattus | L00376 | M12080(GB) |
| | | Norvegicus | | M14127(GB) |
| Tropomyosin | 175, 176 | Rattus | L00377 | M12080(GB) |
| | | Norvegicus | | M14127(GB) |
| Tropomyosin | 177, 178 | Rattus | L00378 | M12080(GB) |
| | | Norvegicus | | M14127(GB) |
| Tropomyosin | 179, 180 | Rattus | L00379 | M12080(GB) |
| | | Norvegicus | | M14127(GB) |
| Tropomyosin | 181, 182 | Rattus | L00380 | M12080(GB) |
| | | Norvegicus | | M14127(GB) |
| Tropomyosin | 183, 184- | Rattus | L00381 | M12080(GB) |
| | 185 | Norvegicus | | M14127(GB) |
| Tropomyosin | 186, 187 | Rattus | L00382 | M12080(GB) |
| | | Norvegicus | | M14127(GB) |
| Transthyretin | 188, 189 | Rattus | K03251 | 136467 |
| Precursor | | Norvegicus | | 205983 |
| (prealbumin) | | | | 57424 |
| | | | | 205981 |
| Transthyretin | 190, 191 | Rattus | X14876 | |
| Precursor | | Norvegicus | | |
| (prealbumin) | | | | |
| Transthyretin | 192, 193 | Rattus | K03252 | |
| Precursor | | Norvegicus | | |
| (prealbumin) | | | | |
| Vimentin | 194 | Rattus | X62951 | 401365 |
| | | Norvegicus | | 56859 |
| | | | | 57479 |
| | | | | 56908 |
| Vimentin | 195, 196 | Rattus | X62952 | |
| | | Norvegicus | | |
| Vimentin | 197 | Rattus | X62953 | |
| | | Norvegicus | | |
| Fatty Acid | 198, 199 | Rattus | S69874 | 1706754 |
| Binding Protein | | Norvegicus | | 546419 |
| | | | | 1836057 |
| | | | | 533123 |
| Fatty Acid | 200, 201 | Rattus | U13253 | |
| Binding Protein | | Norvegicus | | |
| Fatty Acid | 202, 203 | Rattus | S83247 | |
| Binding Protein | | Norvegicus | | |
| Eukaryotic | 204, 205 | Rattus | AF304351 | 9055210 |
| Translation | | Norvegicus | | 10442751 |
| Elongation | | | | 15341783 |
| Factor | | | | 18605703 |
| | | | | 14708537 |
| Eukaryotic | 206, 207 | Rattus | BC023139 | |
| Translation | | Norvegicus | | |
| Elongation | | | | |
| Factor | | | | |
| Eukaryotic | 208, 209- | Rattus | BC003969 | |
| Translation | 211 | Norvegicus | | |
| Elongation | | | | |
| Factor | | | | |
| Eukaryotic | 212, 213 | Rattus | BC013059 | |
| Translation | | Norvegicus | | |
| Elongation | | | | |
| Factor | | | | |
| t-Kininogen | 214, 215 | Rattus | M11883 | 69856615 |
| | | Norvegicus | | 205084 |
| | | | | 205305 |
| t-Kininogen | 216, 217 | Rattus | X02299 | |
| | | Norvegicus | | |
| t-Kininogen | 218, 219- | Rattus | K02814 | |
| | 236 | Norvegicus | | |
| Apolipoprotein | 237, 238 | Rattus | J02588 | 114008 |
| A-IV Precursor | | Norvegicus | | 2029327 |
| | | | | 202942 |
| | | | | 202949 |
| Apolipoprotein | 239, 240 | Rattus | M13508 | |
| A-IV Precursor | | Norvegicus | | |
| Apolipoprotein | 241, 242 | Rattus | M00002 | |
| A-IV Precursor | | Norvegicus | | |
| Preprohapto- | 243, 244- | Rattus | K01933 | 204657 |
| globin | 258 | Norvegicus | | 204656 |
| Galectin 7 | 259, 260 | Homo | L07769 | 4504985 |
| | | Sapiens | | 182131 |
| Lipocortin-III | 261, 262 | Rattus | M20559 | J03898(GB) |
| | | Norvegicus | | 6978503 |
| | | | | 205136 |
| Pyruvate | 263, 264 | Rattus | M24359 | 1346398 |
| Kinase | | Norvegicus | | 206203 |
| | | | | 206206 |
| Pyruvate | 265 | Rattus | M14377 | |
| Kinase | | Norvegicus | | |
| α-1-macro- | 266, 267 | Rattus | M77183 | 202857 |
| globulin | | Norvegicus | | 202856 |
| | | | | 205383 |
| α-1-macro- | 268, 269 | Rattus | M84000 | J05359(GB) |
| globulin | | Norvegicus | | |
| 40S Ribosomal | 270, 271 | Rattus | D25224 | 631907 |
| Protein P40 | | Norvegicus | | 466438 |
| Serotransferrin | 272, 273 | Rattus | X77158 | 6175089 |
| Precursor | | Norvegicus | | 510195 |
| | | | | 1854475 |
| Serotransferrin | 274, 275 | Rattus | D38380 | |
| Precursor | | Norvegicus | | |
| Apolipoprotein | 276, 277 | Rattus | J02597 | 2145143 |
| A-1 | | Norvegicus | | 202935 |
| | | | | 2145146 |
| | | | | 2145144 |
| | | | | 2145142 |
| Apolipoprotein | 278, 279 | Rattus | U79576 | |
| A-1 | | Norvegicus | | |
| Apolipoprotein | 280, 281 | Rattus | U79577 | |
| A-1 | | Norvegicus | | |
| Apolipoprotein | 282, 283 | Rattus | U79578 | |
| A-1 | | Norvegicus | | |
| Apolipoprotein | 284, 285 | Rattus | J02597 | 113997 |
| A-1 Precursor | | Norvegicus | | 202944 |
| | | | | 55746 |
| | | | | 202935 |
| Apolipoprotein | 286, 287 | Rattus | M00001 | |
| A-1 Precursor | | Norvegicus | | |
| Apolipoprotein | 288, 289 | Rattus | X00558 | |
| A-1 Precursor | | Norvegicus | | |
| Thioredoxin | 290, 291 | Rattus | X14878 | 135776 |
| | | Norvegicus | | 57385 |
| Malate | 292, 293 | Rattus | AF093773 | 3747085 |
| Dehydrogenase | | Norvegicus | | 3747084 |
| α-2U-globulin | 294, 295 | Rattus | X14552 | 111366 |
| Precursor | | Norvegicus | | 55569 |
| | | | | 204262 |
| α-2U-globulin | 296, 297 | Rattus | J00738 | |
| Precursor | | Norvegicus | | |
| Lipocortin-1 | 298 | Rattus | S57478 | J05339(GB) |
| | | Norvegicus | | 235879 |
| | | | | 235878 |
| | | | | 56565 |
| Lipocortin-1 | 299, 300 | Rattus | Y00446 | |
| | | Norvegicus | | |
| Phospho- | 301, 302 | Mus | M15668 | 6679291 |
| glycerate | | Musculus | | 202422 |
| Kinase | | | | 341094 |
| Phospho- | 303, 304 | Mus | M23962 | |
| glycerate | | Musculus | | |
| Kinase | | | | |
| RHO GDP | 305, 306 | Mus | AB055070 | 2494703 |
| | | Musculus | | 193461 |
| | | | | 12597248 |
| RHO GOP | 307, 308 | Mus | L07918 | |
| | | Musculus | | |

### DETAILED DESCRIPTION OF THE INVENTION

### I. AMPs

[0028] The present invention is based on the discovery of differentially expressed proteins in protein expression profiles from various stages of angiogenesis. As used herein, “angiogenesis” means the formation of new blood vessels from pre-existing vasculature. The proteins, peptides, polypeptides, or nucleotide sequences encoding the same, of the present invention, are referred to herein collectively, unless indicated otherwise, as Angiogenesis Modulating Proteins (“AMPs”), and may be used as modulators of angiogenesis. As used herein, “modulate angiogenesis,” means to modify angiogenesis. The modulation of angiogenesis, as used herein, encompasses both the stimulation and inhibition of angiogenesis. As used herein, “stimulation of angiogenesis,” means to beneficially enhance or augment a naturally occurring angiogenic process or, alternatively, induce or initiate an angiogenic process. As used herein, “inhibition of angiogenesis,” means to beneficially reduce or diminish either a naturally occurring angiogenic process or disease/condition related angiogenic process or, alternatively, reduce or diminish the initiation of a naturally or disease/condition related angiogenic process.

[0029] The AMPs of the present invention are included in Table I.

[0030] Variants of AMP, are also encompassed by the present invention. As used herein, “variants,” means those proteins, peptides, or polypeptides, or nucleotide sequences encoding the same, that are substantially similar to those described by Table I and which may be used as to modulate angiogenesis. An AMP of Table I may be altered in various ways to yield a variant encompassed by the present invention including amino acid substitutions, deletions, truncations, insertions, and modifications. Methods for such manipulations are generally known in the art. For example, variants can be prepared by mutations in the nucleotide sequence. Methods for mutagenesis and nucleotide sequence alterations are well known in the art. See, for example, Kunkel, Proc. Natl. Acad. Sci. USA, 82, 488-492 (1985); Kunkel et al., Methods in Enzymol., 154, 367-382, (1987); U.S. Pat. No. 4,873,192; Walker and Gaastra, eds., Techniques in Molecular Biology, MacMillan Publishing Company, New York, (1983), and the references cited therein. In one embodiment of the variant, the substitution(s) of the AMP of Table I is conservative in that it minimally disrupts the biochemical properties of the variant. Thus, where mutations are introduced to substitute amino acid residues, positively charged residues (H, K, and R) preferably are substituted with positively-charged residues; negatively-charged residues (D and E) preferably are substituted with negatively-charged residues; and neutral non-polar residues (A, F, I, L, M, P, V, and W) preferably are substituted with neutral non-polar residues. In another embodiment of the variant, the overall charge, structure or hydrophobic/hydrophilic properties of the AMP can be altered without substantially adversely affecting the angiogenesis modulating capacity. In still another embodiment, the variant is an active fragment of an AMP of Table I. In yet another embodiment of the variant, an AMP of Table I is modified by acetylation, carboxylation, phosphorylation, glycosylation, ubiquitination, and labeling, whether accomplished by in vivo or in vitro enzymatic treatment of the AMP or by the synthesis of the AMP using modified amino acids. Non-limiting examples of modifications to amino acids include phosphorylation of tyrosine, serine, and threonine residues; methylation of lysine residues; acetylation of lysine residues; hydroxylation of proline and lysine residues; carboxylation of glutamic acid residues; glycosylation of serine, threonine, or asparagine residues; and ubiquitination of lysine residues. The variant can also include other domains, such as epitope tags and His tags (e.g., the protein can be a fusion protein).

[0031] In yet another embodiment, peptide mimics of an AMP of Table I are encompassed within the meaning of variant. As used herein, “mimic,” means an amino acid or an amino acid analog that has the same or similar functional characteristics of an amino acid. Thus, for example, an arginine analog can be a mimic of arginine if the analog contains a side chain having a positive charge at physiologic pH, as is characteristic of the guanidinium side chain reactive group of arginine. Examples of organic molecules that can be suitable mimics are listed at Table 1 of U.S. Pat. No. 5,807,819. Generally, a peptide variant, or nucleic acid sequence encoding the same, of preferably 99% sequence identity to its respective native amino acid sequence. Fusion proteins, or N-terminal, C-terminal or internal extensions, deletions, or insertions into the peptide sequence shall not be construed as affecting homology.

[0032] “Sequence Identity” or “Homology” at the amino acid or nucleotide sequence level is determined by BLAST (Basic Local Alignment Search Tool) analysis using the algorithm employed by the programs blastp, blastn, blastx, tblastn and tblastx, Altschul et al., Nucleic Acids Res. 25, 3389-3402 (1997) and Karlin et al. Proc. Natl. Acad. Sci., USA, 87, 2264-2268 (1990) which are tailored for sequence similarity searching. The approach used by the BLAST program is to first consider similar segments, with gaps (non-contiguous) and without gaps (contiguous), between a query sequence and a database sequence, then to evaluate the statistical significance of all matches that are identified and finally to summarize only those matches which satisfy a preselected threshold of significance. For a discussion of basic issues in similarity searching of sequence databases, see Altschul et al. Nature Genetics, 6, 119-129 (1994). The search parameters for histograms, descriptions, alignments, (i.e., the statistical significance threshold for reporting matches against database sequences), cutoff, matrix and filter (low complexity) are at the default settings. The default scoring matrix used by blastp, blastx, tblastn, and tblastx is the BLOSUM62 matrix, Henikoff et al. Proc. Natl. Acad. Sci. USA 89, 10915-10919 (1992), recommended for query sequences over 85 nucleotides or amino acids in length.

[0033] For blastn, the scoring matrix is set by the ratios of M (i.e., the reward score for a pair of matching residues) to N (i.e., the penalty score for mismatching residues), wherein the default values for M and N are +5 and −4, respectively. Four blastn parameters were adjusted as follows: Q=10 (gap creation penalty); R=10 (gap extension penalty); wink=1 (generates word hits at every wink^{th} position along the query); and gapw=16 (sets the window width within which gapped alignments are generated). The equivalent Blastp parameter settings were Q=9; R=2; wink=1; and gapw=32. A Bestfit comparison between sequences, available in the GCG package version 10.0, uses DNA parameters GAP=50 (gap creation penalty) and LEN=3 (gap extension penalty) and the equivalent settings in protein comparisons are GAP=8 and LEN=2.

[0034] For the sake of brevity, the use of the term “AMP” hereinafter includes any “variant” thereof.

### II. Methods of Use

[0035] As discussed, the AMPs of the present invention are modulators of angiogenesis. As such, the AMPs (or agents that modulate AMP) of the present invention may be used in the prevention and treatment of angiogenesis mediated disorders. As used herein, “angiogenesis mediated disorders” include: (1) those disorders, diseases and/or unwanted conditions which are characterized by unwanted or elevated angiogenesis referred to herein collectively as “angiogenesis elevated disorders;” or (2) those disorders, diseases and/or unwanted conditions which are characterized by wanted or reduced angiogenesis referred to herein collectively as “angiogenesis reduced disorders.”

[0036] As used herein, “treatment,” means, at a minimum, administration of an AMP (or agent) of the present invention that mitigates an angiogenesis mediated disorder in a mammalian subject, preferably in humans. Thus, the term “treatment” includes preventing an angiogenesis mediated disorder in a mammal, particularly when the mammal is predisposed to acquiring the disorder, but has not yet been diagnosed with the disorder; inhibiting the disorder; and/or alleviating or reversing the disorder. It is understood that the term “prevent” does not require that the disease state be completely thwarted. (See Webster's Ninth Collegiate Dictionary.) Rather, as used herein, the term preventing refers to the ability of the skilled artisan to identify a population that is susceptible to angiogenesis mediated disorders, such that administration of the AMPs of the present invention may occur prior to the onset of the disease. The term does not imply that the disease state be completely avoided.

[0037] In accordance with the inventive method, AMP is provided to cells, preferably endothelial cells, associated with the tissue of interest. Such cells can be cells comprising the tissue of interest, exogenous cells introduced into the tissue, or neighboring cells not within the tissue. Thus, for example, the cells can be cells of the tissue, and AMP is provided to them in situ such that the AMP contacts the cells. Alternatively, the cells can be cells introduced into the tissue, in which case AMP can be transferred to the cells before they are introduced into the tissue (e.g., in vitro), as well as being transferred in situ after introduction into the tissue. The tissue with which the endothelial cells are associated is any tissue in which it is desired to modulate angiogenesis.

[0038] In one aspect of the invention, the method involves providing AMP by supplying an AMP to the cells (e.g., within a suitable composition). Any suitable method can be employed to obtain an AMP. Many suitable AMPs can be purified from tissues which naturally produce AMP or from media conditioned by a variety of AMP-producing cells (e.g., endothelial cells, smooth muscle cells, fibroblasts or parenchymal cells). Alternatively, AMP may be synthesized using standard direct peptide synthesizing techniques (e.g., as summarized in Bodanszky, Principles of Peptide Synthesis, Springer-Verlag, Heidelberg: (1984)), such as via solid-phase synthesis (see, e.g., Merrifield, J. Am. Chem. Soc., 85, 2149-54 (1963); Barany et al., Int. J. Peptide Protein Res., 30, 705-739 (1987); and U.S. Pat. No. 5,424,398). Of course, as genes for AMP are known (see Table I for Genbank or Derwent Accession Nos.); or can be deduced from the polypeptide sequences discussed herein. An AMP can be produced by standard recombinant methods.

[0039] In other protocols, AMP can be provided to the tissue of interest by transferring an expression cassette, including a nucleic acid encoding AMP, to cells associated with the tissue of interest. The cells produce and secrete the AMP such that it is suitably provided to endothelial cells within the tissue to modulate angiogenesis within the tissue of interest. As discussed, coding sequences for AMP are known and others can be deduced. Thus, AMP expression cassettes typically employ coding sequences homologous to these known sequences, e.g., they will hybridize to at least a fragment of the known sequences under at least mild stringency conditions, more preferably under moderate stringency conditions, most preferably under high stringency conditions (employing the definitions of mild, moderate, and high stringency as set forth in Sambrook et al., Molecular Cloning: A Laboratory Manual, 2d edition, Cold Spring Harbor Press (1989)).

[0040] In addition to the AMP coding sequence, an expression cassette includes a promoter, and, in the context of the present invention, the promoter must be able to drive the expression of the AMP gene within the cells. Many viral promoters are appropriate for use in such an expression cassette (e.g., retroviral ITRs, LTRs, immediate early viral promoters (IEp) (such as herpesvirus IEp (e.g., ICP4-IEp and ICP0-IEp) and cytomegalovirus (CMV) IEp), and other viral promoters (e.g., late viral promoters, latency-active promoters (LAPs), Rous Sarcoma Virus (RSV) promoters, and Murine Leukemia Virus (MLV) promoters)). Other suitable promoters are eukaryotic promoters, such as enhancers (e.g., the rabbit beta-globin regulatory elements), constitutively active promoters (e.g., the beta-actin promoter, etc.), signal specific promoters (e.g., inducible and/or repressible promoters, such as a promoter responsive to TNF or RU486, the metallothionine promoter, etc.), and tumor-specific promoters.

[0041] Within the expression cassette, the AMP gene and the promoter are operably linked such that the promoter is able to drive the expression of the AMP gene. As long as this operable linkage is maintained, the expression cassette can include more than one gene, such as multiple genes separated by ribosome entry sites. Furthermore, the expression cassette can optionally include other elements, such as polyadenylation sequences, transcriptional regulatory elements (e.g., enhancers, silencers, etc.), or other sequences.

[0042] The expression cassette must be introduced into the cells in a manner suitable for them to express the AMP gene contained therein. Any suitable vector can be so employed, many of which are known in the art. Examples of such vectors include naked DNA vectors (such as oligonucleotides or plasmids), viral vectors such as adeno-associated viral vectors, Bems et al., Ann. N.Y Acad. Sci., 772, 95-104 (1995), adenoviral vectors, Bain et al., Gene Therapy, 1, S68 (1994), herpesvirus vectors, Fink et al., Ann. Rev. Neurosci., 19, 265-87 (1996), packaged amplicons, Federoff et al., Proc. Nat. Acad. Sci. USA, 89, 1636-40 (1992), pappiloma virus vectors, picornavirus vectors, polyoma virus vectors, retroviral vectors, SV40 viral vectors, vaccinia virus vectors, and other vectors. A non-limiting example of a suitable vector is disclosed in U.S. patent application Ser. No. 2001-0041679 A1.

[0043] In addition to the expression cassette of interest, the vector can also include other genetic elements, such as, for example, genes encoding a selectable marker (e.g., beta-gal or a marker conferring resistance to a toxin), a pharmacologically active protein, a transcription factor, or other biologically active substance.

[0044] Once a given type of vector is selected, its genome must be manipulated for use as a background vector, after which it must be engineered to incorporate exogenous polynucleotides. Methods for manipulating the genomes of vectors are well known in the art (see, e.g., Sambrook et al., supra) and include direct cloning, site specific recombination using recombinases, homologous recombination, and other suitable methods of constructing a recombinant vector. In this manner, the expression cassette can be inserted into any desirable position of the vector.

[0045] The vector harboring the AMP expression cassette is introduced into the cells by any means appropriate for the vector employed. Many such methods are well-known in the art (Sambrook et al., supra; see also Watson et al., Recombinant DNA, Chapter 12, 2d edition, Scientific American Books (1992)). Thus, plasmids are transferred by methods such as calcium phosphate precipitation, electroporation, liposome-mediated transfection, gene gun, microinjection, viral capsid-mediated transfer, polybrene-mediated transfer, protoplast fusion, etc. Viral vectors are best transferred into the cells by infecting them; however, the mode of infection can vary depending on the virus.

[0046] Cells into which the AMP gene has been transferred can be used in the inventive method as transient transformants. Alternatively, where the cells are cells in vitro, they can be subjected to several rounds of clonal selection (if the vector also contains a gene encoding a selectable marker, such as a gene conferring resistance to a toxin) to select for stable transformants.

[0047] Within the cells, the AMP gene is expressed such that the cells express and secrete AMP. Successful expression of the gene can be assessed via standard molecular biological techniques (e.g., Northern hybridization, Western blotting, immunoprecipitation, enzyme immunoassay, etc.). Reagents for detecting the expression of AMP genes and the secretion of AMP from transfected cells are known in the art (see, e.g., published international patent applications WO 95/33480 and WO 93/24529); Steele et al., supra).

[0048] Depending on the location of the tissue of interest, AMP can be supplied in any manner suitable to provide it to endothelial cells within the tissue of interest. Thus, for example, a composition containing a source of AMP (i.e., an AMP polypeptide or an AMP expression cassette, as described herein) can be introduced into the systemic circulation, which will distribute the source of AMP to the tissue of interest. Alternatively, a composition containing a source of AMP can be applied topically to the tissue of interest (e.g., injected as a bolus within a tumor or intercutaneous or subcutaneous site, applied to all or a portion of the surface of the skin, dropped onto the surface of the eye, etc.).

[0049] A. Treatment of Angiogenesis Elevated Disorder.

[0050] The AMPs (or agents) of the present invention may be used in a method for the treatment of an angiogenesis mediated disorder. In one aspect in the method for the treatment of an angiogenesis mediated disorder, an AMP may be used in a method for the treatment of an “angiogenesis elevated disorder.” As used herein, an “angiogenesis elevated disorder” is one that involves unwanted or elevated angiogenesis in the biological manifestation of the disease, disorder, and/or condition; in the biological cascade leading to the disorder; or as a symptom of the disorder. This “involvement” of angiogenesis in an angiogenesis elevated disorder includes, but is not limited to, the following: (1) The unwanted or elevated angiogenesis as a “cause” of the disorder or biological manifestation, whether the level of angiogenesis is elevated genetically, by infection, by autoimmunity, trauma, biomechanical causes, lifestyle, or by some other causes. (2) The angiogenesis as part of the observable manifestation of the disease or disorder. That is, the disease or disorder is measurable in terms of the increased angiogenesis. From a clinical standpoint, unwanted or elevated angiogenesis indicates the disease, however, angiogenesis need not be the “hallmark” of the disease or disorder. (3) The unwanted or elevated angiogenesis is part of the biochemical or cellular cascade that results in the disease or disorder. In this respect, inhibition of angiogenesis interrupts the cascade, and thus controls the disease. Non-limiting examples of angiogenesis reduced disorders that may be treated by the present invention are herein described below.

[0051] The AMPs of present invention may be used to treat diseases associated with retinal/choroidal neovascularization that include, but are not limited to, diabetic retinopathy, macular degeneration, sickle cell anemia, sarcoid, syphilis, pseudoxanthoma elasticum, Paget's disease, vein occlusion, artery occlusion, carotid obstructive disease, chronic uveitis/vitritis, mycobacterial infections, Lyme's disease, systemic lupus erythematosis, retinopathy of prematurity, Eales' disease, Behcet's disease, infections causing a retinitis or choroiditis, presumed ocular histoplasmosis, Best's disease, myopia, optic pits, Stargardt's disease, pars planitis, chronic retinal detachment, hyperviscosity syndromes, toxoplasmosis, trauma and post-laser complications. Other diseases include, but are not limited to, diseases associated with rubeosis (neovasculariation of the angle) and diseases caused by the abnormal proliferation of fibrovascular or fibrous tissue including all forms of proliferative vitreoretinopathy, whether or not associated with diabetes.

[0052] AMPs of the present invention can treat diseases associated with chronic inflammation. Diseases with symptoms of chronic inflammation include inflammatory bowel diseases such as Crohn's disease and ulcerative colitis, psoriasis, sarcoidosis and rheumatoid arthritis. Angiogenesis is a key element that these chronic inflammatory diseases have in common. The chronic inflammation depends on continuous formation of capillary sprouts to maintain an influx of inflammatory cells. The influx and presence of the inflammatory cells produce granulomas and thus, maintain the chronic inflammatory state. Inhibition of angiogenesis by the compositions and methods of the present invention would prevent the formation of the granulomas and alleviate the disease.

[0053] AMPs may used to treat patients with inflammatory bowel diseases such as Crohn's disease and ulcerative colitis. Both Crohn's disease and ulcerative colitis are characterized by chronic inflammation and angiogenesis at various sites in the gastrointestinal tract. Crohn's disease is characterized by chronic granulomatous inflammation throughout the gastrointestinal tract consisting of new capillary sprouts surrounded by a cylinder of inflammatory cells. Prevention of angiogenesis by the AMPs of the present invention inhibits the formation of the sprouts and prevents the formation of granulomas. Crohn's disease occurs as a chronic transmural inflammatory disease that most commonly affects the distal ileum and colon but may also occur in any part of the gastrointestinal tract from the mouth to the anus and perianal area. Patients with Crohn's disease generally have chronic diarrhea associated with abdominal pain, fever, anorexia, weight loss and abdominal swelling. Ulcerative colitis is also a chronic, nonspecific, inflammatory and ulcerative disease arising in the colonic mucosa and is characterized by the presence of bloody diarrhea.

[0054] The inflammatory bowel diseases also show extraintestinal manifestations such as skin lesions. Such lesions are characterized by inflammation and angiogenesis and can occur at many sites other than the gastrointestinal tract. The AMPs of the present invention may be capable of treating these lesions by preventing the angiogenesis, thus reducing the influx of inflammatory cells and the lesion formation.

[0055] Sarcoidosis is another chronic inflammatory disease that is characterized as a multisystem granulomatous disorder. The granulomas of this disease may form anywhere in the body and thus the symptoms depend on the site of the granulomas and whether the disease active. The granulomas are created by the angiogenic capillary sprouts providing a constant supply of inflammatory cells.

[0056] AMPs of the present invention can also treat the chronic inflammatory conditions associated with psoriasis. Psoriasis, a skin disease, is another chronic and recurrent disease that is characterized by papules and plaques of various sizes. Prevention of the formation of the new blood vessels necessary to maintain the characteristic lesions leads to relief from the symptoms.

[0057] Another disease that may be treated according to the present invention, is rheumatoid arthritis. Rheumatoid arthritis is a chronic inflammatory disease characterized by nonspecific inflammation of the peripheral joints. It is believed that the blood vessels in the synovial lining of the joints undergo angiogenesis. In addition to forming new vascular networks, the endothelial cells release factors and reactive oxygen species that lead to pannus growth and cartilage destruction. The factors involved in angiogenesis may actively contribute to, and help maintain, the chronically inflamed state of rheumatoid arthritis. Other diseases that can be treated according to the present invention are hemangiomas, Osler-Weber-Rendu disease, or hereditary hemorrhagic telangiectasia, solid or blood borne tumors and acquired immune deficiency syndrome.

[0058] B. Treatment of an Angiogenesis Reduced Disorder.

[0059] The AMPs (or agents) of the present invention may be used in a method for the treatment of an angiogenesis mediated disorder. In one aspect in the method for the treatment of an angiogenesis mediated disorder, an AMP may be used in a method for the treatment of an “angiogenesis reduced disorder.” As used herein, an “angiogenesis reduced disorder” is one that involves wanted or stimulated angiogenesis to treat a disease, disorder, and/or condition. The disorder is one characterized by tissue that is suffering from or be at risk of suffering from ischemic damage, infection, and/or poor healing, which results when the tissue is deprived of an adequate supply of oxygenated blood due to inadequate circulation. As used herein, “tissue” is used in the broadest sense, to include, but not limited to, the following: cardiac tissue, such as myocardium and cardiac ventricles; erectile tissue; skeletal muscle; neurological tissue, such as from the cerebellum; internal organs, such as the brain, heart, pancreas, liver, spleen, and lung; or generalized area of the body such as entire limbs, a foot, or distal appendages such as fingers or toes. This inadequate blood supply to tissue includes the following: (1) The inadequate blood supply as a “cause” of the disorder or the biological manifestation thereof, whether the level of blood supply is reduced genetically, by infection, by autoimmunity, trauma, surgery, biomechanical causes, lifestyle, or by some other causes. (2) The inadequate blood supply as part of the observable manifestation of the disorder. That is, the disorder is measurable in terms of the inadequate blood supply. From a clinical standpoint, inadequate blood supply indicates the disease, however, inadequate blood supply need not be the “hallmark” of the disorder. (3) The inadequate blood supply is part of the biochemical or cellular cascade that results in the disorder. In this respect, stimulation of angiogenesis interrupts the cascade, and thus controls the disorder. Non-limiting examples of angiogenesis reduced disorders that may be treated by the present invention are herein described below.

[0060] 1. Method of Vascularizing Ischermic Tissue

[0061] In one aspect in the method for the treatment of an angiogenesis reduced disorders, an AMP (or agent) may be used in a method of vascularizing ischemic tissue. As used herein, “ischemic tissue,” means tissue that is deprived of adequate blood flow. Examples of ischemic tissue include, but are not limited to, tissue that lack adequate blood supply resulting from mycocardial and cerebral infarctions, mesenteric or limb ischemia, or the result of a vascular occlusion or stenosis. In one example, the interruption of the supply of oxygenated blood may be caused by a vascular occlusion. Such vascular occlusion can be caused by arteriosclerosis, trauma, surgical procedures, disease, and/or otheretiologies. There are many ways to determine if a tissue is at risk of suffering ischemic damage from undesirable vascular occlusion. Such methods are well known to physicians who treat such conditions. For example, in myocardial disease these methods include a variety of imaging techniques (e.g., radiotracer methodologies, x-ray, and MRI) and physiological tests. Therefore, induction of angiogenesis in tissue affected by or at risk of being affected by a vascular occlusion is an effective means of preventing and/or attenuating ischemia in such tissue. Thus, the treatment of skeletal muscle and myocardial ischemia, stroke, coronary artery disease, peripheral vascular disease, coronary artery disease are fully contemplated.

[0062] Any person skilled in the art of using standard techniques can measure the vascularization of tissue. Non-limiting examples of measuring vascularization in a subject include: SPECT (single photon emission computed tomography); PET (positron emission tomography); MRI (magnetic resonance imaging); and combination thereof, by measuring blood flow to tissue before and after treatment. Angiography can be used as an assessment of macroscopic vascularity. Histologic evaluation can be used to quantify vascularity at the small vessel level. These and other techniques are discussed in Simons, et al., “Clinical trials in coronary angiogenesis,” Circulation, 102, 73-86 (2000).

[0063] 2. Method of Repairing Tissue

[0064] In one aspect in the method for the treatment of an angiogenesis reduced disorder, an AMP (or agent) may be used in a method of repairing tissue. As used herein, “repairing tissue” means promoting tissue repair, regeneration, growth, and/or maintenance including, but not limited to, wound repair or tissue engineering. One skilled in the art readily appreciates that new blood vessel formation is required for tissue repair. In turn, tissue may be damaged by, including, but not limited to, traumatic injuries or conditions including arthritis, osteoporosis and other skeletal disorders, and burns. Tissue may also be damaged by results from injuries due to surgical procedures, irradiation, laceration, toxic chemicals, viral infection bacterial infection or burns. Tissue in need of repair also includes non-healing wounds. Non-limiting examples of non-healing wounds include: non-healing skin ulcers resulting from diabetic pathology; or fractures that do not heal readily.

[0065] AMPs may also be used in a method to aid in tissue repair in the context of guided tissue regeneration (GTR) procedures. Such procedures are currently used by those skilled in the medical arts to accelerate wound healing following invasive surgical procedures.

[0066] AMPs may be used in a method of promoting tissue repair characterized by enhanced tissue growth during the process of tissue engineering. As used herein, “tissue engineering” is defined as the creation, design, and fabrication of biological prosthetic devices, in combination with synthetic or natural materials, for the augmentation or replacement of body tissues and organs. Thus, the present method can be used to augment the design and growth of human tissues outside the body for later implantation in the repair or replacement of diseased tissues. For example, AMPs may be useful in promoting the growth of skin graft replacements that are used as a therapy in the treatment of burns.

[0067] In another aspect of tissue engineering, AMPs of the present invention may be included in cell-containing or cell-free devices that induce the regeneration of functional human tissues when implanted at a site that requires regeneration. As previously discussed, biomaterial-guided tissue regeneration can be used to promote bone regrowth in, for example, periodontal disease. Thus, an AMP may be used to promote the growth of reconstituted tissues assembled into three-dimensional configurations at the site of a wound or other tissue in need of such repair.

[0068] In another aspect of tissue engineering, AMPs can be included in external or internal devices containing human tissues designed to replace the function of diseased internal tissues. This approach involves isolating cells from the body, placing them on or within structural matrices, and implanting the new system inside the body or using the system outside the body. The method of the invention can be included in such matrices to promote the growth of tissues contained in the matrices. For example, an AMP can be included in a cell-lined vascular graft to promote the growth of the cells contained in the graft. It is envisioned that the method of the invention can be used to augment tissue repair, regeneration and engineering in products such as cartilage and bone, central nervous system tissues, muscle, liver, and pancreatic islet (insulin-producing) cells.

### III. Methods of Screening an Agent Useful for Treating an Angiogenesis Mediated Disorder

[0069] The present invention is also based upon the surprising discovery of differential protein expression at various stages of angiogenesis using a rat cornea model of angiogenesis. In view of these surprising discoveries, AMPs may be used for screening agents useful in the treatment of angiogenesis mediated disorders in any of a variety of well-known drug screening techniques.

[0070] In one embodiment of the invention, AMPs can be used for screening libraries of agents in any of a variety of drug screening techniques. The AMP employed in such screening may be free in solution, affixed to a solid support, borne on a cell surface, or located intracellularly. The modulation of AMP activity or expression by the agent being tested may be measured.

[0071] Another technique for agent screening provides for high throughput screening of agents having suitable binding affinity to the protein or nucleotide of interest. (See, e.g., Geysen, et al. (1984) PCT application W084/03564.) In this method, large numbers of different test agents are synthesized on a solid substrate, such as plastic pins or some other surface. The test agents are reacted with AMP and washed. Bound AMP is then detected by methods well known in the art. Purified AMP can also be coated directly onto plates for use in the aforementioned drug screening techniques. Alternatively, non-neutralizing antibodies can be used to capture the AMP and immobilize it on a solid support.

[0072] In yet another embodiment, one may use competitive drug screening assays in which neutralizing antibodies capable of binding AMP specifically compete with a test agent for binding AMP. In this manner, antibodies can be used to detect the presence of any peptide which shares one or more antigenic determinants with AMP.

[0073] A. Sources of AMP

[0074] Isolated AMP can be obtained by methods well known in the art. For example, AMP may be synthesized using standard direct peptide synthesizing techniques (e.g., as summarized in Bodanszky, Principles of Peptide Synthesis, Springer-Verlag, Heidelberg: (1984)), such as via solid-phase synthesis (see, e.g., Merrifield, J. Am. Chem. Soc., 85, 2149-54 (1963) Roberge, J. Y. et al., Science 269: 202-204 (1995); Barany et al., Int. J. Peptide Protein Res., 30, 705-739 (1987); and U.S. Pat. No. 5,424,398). Of course, as genes for AMP are known, disclosed herein, or can be deduced from the polypeptide sequences discussed herein. AMP can be produced by standard recombinant methods. The proteins may be isolated or purified in a variety of ways known to those skilled in the art depending on what other components are present in the sample. Standard purification methods include electrophoretic, molecular, immunological, and chromatographic techniques, including ion exchange, hydrophobic, affinity, and reverse-phase HPLC chromatography, chromatofocussing, selective precipitation with such substances as ammonium sulfate; and others (see, e.g., Scopes, Protein Purification: Principles and Practice (1982); U.S. Pat. No. 4,673,641; and Sambrook et all, supra). For example, the target protein can be purified using a standard anti-target antibody column. Ultrafiltration and diafiltration techniques, in conjunction with protein concentration, are also useful.

[0075] For a cell based assay in accordance with the present invention, cells comprising AMP are well known in the art or can be modified to comprise AMP by methods well known in the art. Suitable cells that naturally comprise AMP include, but are not limited to, liver, lung, skeletal muscle, and brain. Cell lines that comprise enhanced levels AMP may be either purchased commercially or constructed. Well-known methods of providing cells with AMP include incorporating an expression cassette, including a nucleic acid encoding AMP to cells of interest. Standard transfection or transformation methods can be used to produce bacterial, mammalian, yeast or insect cell lines that express large quantities of protein, which are then purified using standard techniques (see, e.g., Colley et al., J. Biol. Chem. 264:17619-17622 (1989); Guide to Protein Purification, in Methods in Enzymology, vol. 82 (Deutscher ed., 1990)).

[0076] B. Measuring Activity of AMP.

[0077] The activity of AMP can be measured by methods well known in the art. For example, if the AMP is a phophatase, phosphatase activity is measured. In one format, the phosphatase activity is measured using a fluorescent assay that generates a fluorescent signal when the substrate is acted upon by the enzyme. Other small molecule phosphatase substrates such as PNPP (para nitro phenyl phosphate) could also be used. These assay formats may be scaled-up for utilization in a high throughput screening assays using FRET (fluorescence resonance energy transfer) FP (Fluorescence polarization) or Malachite green assay. Another means of assaying for AMP phosphatase activity is to measure the loss of phosphorylation of its known target.

[0078] C. Measuring Expression of AMP.

[0079] The expression of AMP can be measured by methods well known in the art. In general, host cells that contain the nucleic acid sequence encoding AMP and that express AMP may be identified by a variety of procedures known to those of skill in the art. These procedures include, but are not limited to, DNA-DNA or DNA-RNA hybridizations, PCR amplification, and protein bioassay or immunoassay techniques which include membrane, solution, or chip based technologies for the detection and/or quantification of nucleic acid or protein sequences.

[0080] Immunological methods for detecting and measuring the expression of AMP using either specific polyclonal or monoclonal antibodies are known in the art. Examples of such techniques include enzyme-linked immunosorbent assays (ELISAs), radioimmunoassays (RIAs), and fluorescence activated cell sorting (FACS). A two-site, monoclonal-based immunoassay utilizing monoclonal antibodies reactive to two non-interfering epitopes on AMP is preferred, but a competitive binding assay may be employed. These and other assays are well known in the art. (See, e.g., Hampton, R. et al. (1990) Serological Methods, a Laboratory Manual, APS Press, St Paul, Minn., Section IV; Coligan, J. E. et al. (1997 and periodic supplements) Current Protocols in Immunology, Greene Pub. Associates and Wiley-Interscience, New York, N.Y.; and Maddox, D. E. et al. (1983) J. Exp. Med. 158:1211-1216).

[0081] A wide variety of labels and conjugation techniques are known by those skilled in the art and may be used in various nucleic acid and amino acid assays. Means for producing labeled hybridization or PCR probes for detecting sequences related to polynucleotides encoding AMP include oligolabeling, nick translation, end-labeling, or PCR amplification using a labeled nucleotide. Alternatively, the sequences encoding AMP, or any fragments thereof, may be cloned into a vector for the production of an mRNA probe. Such vectors are known in the art, are commercially available, and may be used to synthesize RNA probes in vitro by addition of an appropriate RNA polymerase such as T7, T3, or SP6 and labeled nucleotides. These procedures may be conducted using a variety of commercially available kits, such as those provided by Pharmacia & Upjohn (Kalamazoo, Mich.), Promega (Madison, Wis.), and U.S. Biochemical Corp. (Cleveland, Ohio). Suitable reporter molecules or labels which may be used for ease of detection include radionuclides, enzymes, fluorescent, chemiluminescent, or chromogenic agents, as well as substrates, cofactors, inhibitors, magnetic particles, and the like.

[0082] D. Agent

[0083] As used herein, the term “agent,” is used in the broadest sense, to include, without limitation: peptides, peptidomimetics, polypeptides, proteins, chemical compounds, nucleotides, antibodies, small molecules, vitamin derivatives, or carbohydrates. In one embodiment, the agent is an agonist. In another embodiment, the agent is an antagonist.

[0084] For example, an agent that may modulate AMP gene expression is a polynucleotide. The polynucleotide may be an antisense, a triplex agent, or a ribozyme. For example, an antisense may be directed to the structural gene region or to the promoter region of an AMP gene.

[0085] In another example, an agent that may modulate AMP translation is an antisense nucleic acid or ribozyme that could be used to bind to the AMP mRNA or to cleave it. Antisense RNA or DNA molecules bind specifically with a targeted gene's mRNA message, interrupting the expression of that gene's protein product.

[0086] In one format, in the screening for an agent that modulates the expression of AMP, the assay format is such that the cell lines that contain reporter gene fusions between the open reading frame defined by nucleotides encoding AMP and/or the 5′ and/or 3′ regulatory elements and any assayable fusion partner may be prepared. Numerous assayable fusion partners are known and readily available including the firefly luciferase gene and the gene encoding chloramphenicol acetyltransferase, Alam et al. Anal. Biochem., 188, 245-254 (1990). Cell lines containing the reporter gene fusions are then exposed to the agent to be tested under appropriate conditions and time. Differential expression of the reporter gene between samples exposed to the agent and control samples identifies agents that modulate the expression of a nucleic acid encoding AMP.

[0087] Additional assay formats may be used to monitor the ability of the agent to modulate the expression of a nucleic acid encoding AMP. For instance, mRNA expression may be monitored directly by hybridization to the nucleic acids of encoding AMP. Another way to evaluate AMP expression levels is to use either quantitative or semi-quantitative PCR. Semi-quantitative PCR is performed by using a thermo-stable DNA polymerase and temperature cycling to “amplify” a portion of a given cDNA species using specific oligonuceotide primers as described in Sambrook et al., Molecular Cloning: A Laboratory Manual, 2d edition, Cold Spring Harbor Press (1989). An example of quantitative PCR is the use of TaqMan™ analysis developed and described by Applied Biosystems, (ABI). Cell lines are exposed to the agent to be tested under appropriate conditions and time and total RNA or mRNA is isolated by standard procedures such those disclosed in Sambrook et al. Molecular Cloning—A Laboratory Manual, Cold Spring Harbor Laboratory Press (1989).

[0088] Probes to detect differences in RNA expression levels between cells exposed to the agent and control cells may be prepared from the nucleic acids of the invention. It is preferable, but not necessary, to design probes which hybridize only with target nucleic acids under conditions of high stringency. Only highly complementary nucleic acid hybrids form under conditions of high stringency. Accordingly, the stringency of the assay conditions determines the amount of complementation that should exist between two nucleic acid strands in order to form a hybrid. Stringency should be chosen to maximize the difference in stability between the probe:target hybrid and probe:non-target hybrids.

[0089] Probes may be designed from the nucleic acids of the invention through methods known in the art. For instance, the G+C content of the probe and the probe length can affect probe binding to its target sequence. Methods to optimize probe specificity are commonly available in Sambrook et al., Molecular Cloning—A Laboratory Manual, Cold Spring Harbor Laboratory Press, (1989) or Ausubel et al., Current Protocols in Molecular Biology, Greene Publishing Co. (1995).

[0090] Hybridization conditions are modified using known methods, such as those described by Sambrook et al. and Ausubel et al. as required for each probe. Hybridization of total cellular RNA or RNA enriched for polyA RNA can be accomplished in any available format. For instance, total cellular RNA or RNA enriched for polyA RNA can be affixed to a solid support and the solid support exposed to at least one probe comprising at least one, or part of one of the sequences of the invention under conditions in which the probe will specifically hybridize. Alternatively, nucleic acid fragments comprising at least one, or part of one of the sequences of the invention can be affixed to a solid support, such as a silicon chip or a porous glass wafer. The glass wafer can then be exposed to total cellular RNA or polyA RNA from a sample under conditions in which the affixed sequences will specifically hybridize. Such solid supports and hybridization methods are widely available, for example, those disclosed in WO 95/11755. By examining for the ability of a given probe to specifically hybridize to an RNA sample from an untreated cell population and from a cell population exposed to the agent, agents which up or down regulate the expression of a nucleic acid encoding HPTPbeta are identified.

[0091] Hybridization for qualitative and quantitative analysis of mRNA may also be carried out by using a RNase Protection Assay (i.e., RPA, see Ma et al., Methods 10, 273-238 (1996)). Briefly, an expression vehicle comprising cDNA encoding the gene product and a phage specific DNA dependent RNA polymerase promoter (e.g., T7, T3 or SP6 RNA polymerase) is linearized at the 3′ end of the cDNA molecule, downstream from the phage promoter, wherein such a linearized molecule is subsequently used as a template for synthesis of a labeled antisense transcript of the cDNA by in vitro transcription. The labeled transcript is then hybridized to a mixture of isolated RNA (i.e., total or fractionated mRNA) by incubation at 45° C. overnight in a buffer comprising 80% formamide, 40 mM Pipes (pH 6.4), 0.4 M NaCl and 1 mM EDTA. The resulting hybrids are then digested in a buffer comprising 40 ug/ml ribonuclease A and 2 ug/ml ribonuclease. After deactivation and extraction of extraneous proteins, the samples are loaded onto urea/polyacrylamide gels for analysis.

[0092] In another assay format, cells or cell lines are first identified which express the gene products of AMP physiologically. Cell and/or cell lines so identified would be expected to comprise the necessary cellular machinery such that the fidelity of modulation of the transcriptional apparatus is maintained with regard to exogenous contact of agent with appropriate surface transduction mechanisms and/or the cytosolic cascades. Further, such cells or cell lines would be transduced or transfected with an expression vehicle (e.g., a plasmid or viral vector) construct comprising an operable non-translated 5′-promoter containing end of the structural gene encoding the instant gene products fused to one or more antigenic fragments, which are peculiar to the instant gene products, wherein said fragments are under the transcriptional control of said promoter and are expressed as polypeptides whose molecular weight can be distinguished from the naturally occurring polypeptides or may further comprise an immunologically distinct tag or other detectable marker. Such a process is well known in the art (see Sambrook et al., Molecular Cloning—A Laboratory Manual, Cold Spring Harbor Laboratory Press (1989)).

[0093] Cells or cell lines transduced or transfected as outlined above are then contacted with agents under appropriate conditions; for example, the agent in a pharmaceutically acceptable excipient is contacted with cells in an aqueous physiological buffer such as phosphate buffered saline (PBS) at physiological pH, Eagles balanced salt solution (BSS) at physiological pH, PBS or BSS comprising serum or conditioned media comprising PBS or BSS and/or serum incubated at 37° C. Said conditions may be modified as deemed necessary by one skilled in the art. Subsequent to contacting the cells with the agent, said cells are disrupted and the polypeptides of the lysate are fractionated such that a polypeptide fraction is pooled and contacted with an antibody to be further processed by immunological assay (e.g., ELISA, immunoprecipitation or Western blot). The pool of proteins isolated from the “agent-contacted” sample will be compared with a control sample where only the excipient is contacted with the cells and an increase or decrease in the immunologically generated signal from the agent-contacted sample compared to the control will be used to distinguish the effectiveness of the agent.

[0094] In one format, the specific activity of AMP is normalized to a standard unit, between a cell population that has been exposed to the agent to be tested and compared to an un-exposed control cell population. Cell lines or populations are exposed to the agent to be tested under appropriate conditions and time. Cellular lysates may be prepared from the exposed cell line or population and a control, unexposed cell line or population. The cellular lysates are then analyzed with a probe.

[0095] Antibody probes can be prepared by immunizing suitable mammalian hosts utilizing appropriate immunization protocols using the proteins of the invention or antigen-containing fragments thereof. While the polyclonal antisera produced in this way may be satisfactory for some applications, for pharmaceutical compositions, use of monoclonal preparations is preferred. Immortalized cell lines which secrete the desired monoclonal antibodies may be prepared using standard methods, (see e.g., Kohler & Milstein, Biotechnology, 24, 524-526 (1992) or modifications which affect immortalization of lymphocytes or spleen cells, as is generally known.

[0096] Fragments of the monoclonal antibodies or the polyclonal antisera that contain the immunologically significant portion can be used as antagonists, as well as the intact antibodies. Use of immunologically reactive fragments, such as Fab or Fab′ fragments, is often preferable, especially in a therapeutic context, as these fragments are generally less immunogenic than the whole immunoglobulin.

[0097] The antibodies or fragments may also be produced, using current technology, by recombinant means. Antibody regions that bind specifically to the desired regions of the protein can also be produced in the context of chimeras with multiple species origin, for instance, humanized antibodies. The antibody can therefore be a humanized antibody or human antibody, as described in U.S. Pat. No. 5,585,089 or Riechmann et al., Nature 332, 323-327 (1988).

[0098] One class of agents that may modulate AMP activity includes peptide mimetics that mimic the three-dimensional structure of an AMP protein. Such peptide mimetics may have significant advantages over naturally occurring peptides, including, for example: more economical production, greater chemical stability, enhanced pharmacological properties (half-life, absorption, potency, efficacy, etc.), altered specificity (e.g., a broad-spectrum of biological activities), reduced antigenicity and others.

[0099] In one form, mimetics are peptide-containing molecules that mimic elements of protein secondary structure. The underlying rationale behind the use of peptide mimetics is that the peptide backbone of proteins exists chiefly to orient amino acid side chains in such a way as to facilitate molecular interactions, such as those of antibody and antigen. A peptide mimetic is expected to permit molecular interactions similar to the natural molecule.

[0100] In another form, peptide analogs are commonly used in the pharmaceutical industry as non-peptide drugs with properties analogous to those of the template peptide. These types of non-peptide compounds are also referred to as peptide mimetics or peptidomimetics, Fauchere, Adv. Drug Res., 15, 29-69 (1986); Veber & Freidinger, Trends Neurosci., 8, 392-396 (1985); Evans et al., J. Med. Chem., 30, 1229-1239 (1987) which are incorporated herein by reference and are usually developed with the aid of computerized molecular modeling.

[0101] Peptide mimetics that are structurally similar to therapeutically useful peptides may be used to produce an equivalent therapeutic or prophylactic effect. Generally, peptide mimetics are structurally similar to a paradigm polypeptide (i.e., a polypeptide that has a biochemical property or pharmacological activity), but have one or more peptide linkages optionally replaced by a linkage by methods known in the art.

[0102] Labeling of peptide mimetics usually involves covalent attachment of one or more labels, directly or through a spacer (e.g., an amide group), to non-interfering positions on the peptide mimetic that are predicted by quantitative structure-activity data and molecular modeling. Such non-interfering positions generally are positions that do not form direct contacts with the macromolecules to which the peptide mimetic binds to produce the therapeutic effect. Derivitization (e.g., labeling) of peptide mimetics should not substantially interfere with the desired biological or pharmacological activity of the peptide mimetic.

[0103] The use of peptide mimetics can be enhanced through the use of combinatorial chemistry to create drug libraries. The design of peptide mimetics can be aided by identifying amino acid mutations that increase or decrease binding of the protein to its binding partners. Approaches that can be used include the yeast two hybrid method (see Chien et al., Proc. Natl. Acad. Sci., USA, 88, 9578-9582 (1991)) and using the phage display method. The two hybrid method detects protein-protein interactions in yeast, Fields et al., Nature, 340, 245-246 (1989). The phage display method detects the interaction between an immobilized protein and a protein that is expressed on the surface of phages such as lambda and M13, Amberg et al., Strategies, 6, 2-4 (1993); Hogrefe et al., Gene, 128, 119-126 (1993). These methods allow positive and negative selection for protein-protein interactions and the identification of the sequences that determine these interactions.

### IV. Method of Administrating an Agent that Modulates AMP Activity or Expression

[0104] One aspect of the invention provides for a method for preventing or treating an angiogenesis mediated disorder by administering a safe and effective amount of an agent that modulates AMP expression or AMP activity. Agents of the present invention may be administered by those methods well-known in the art.

[0105] For example, the delivery of antisense, triplex agents, ribozymes, competitive inhibitors and the like can be achieved using a recombinant expression vector such as a chimeric virus or a colloidal dispersion system. Various viral vectors which can be utilized for gene therapy as taught herein include, but are not limited to, adenovirus, herpes virus, vaccinia, or, in one embodiment, an RNA virus such as a retrovirus. Preferably, the retroviral vector is a derivative of a murine or avian retrovirus. Examples of retroviral vectors in which a single foreign gene can be inserted include, but are not limited to: Moloney murine leukemia virus (MoMuLV), Harvey murine sarcoma virus (HaMuSV), murine mammary tumor virus (MuMTV), and Rous Sarcoma Virus (RSV). A number of additional retroviral vectors can incorporate multiple genes. All of these vectors can transfer or incorporate a gene for a selectable marker so that transduced cells can be identified and generated. By inserting a polynucleotide sequence of interest into the viral vector, along with another gene that encodes the ligand for a receptor on a specific target cell, for example, the vector is now target specific. Preferred targeting is accomplished by using an antibody to target the retroviral vector. Those of skill in the art will know of, or can readily ascertain without undue experimentation, specific polynucleotide sequences which can be inserted into the retroviral genome to allow target specific delivery of the retroviral vector containing the antisense polynucleotide.

[0106] Another targeted delivery system for antisense polynucleotides a colloidal dispersion system. Colloidal dispersion systems include macromolecule complexes, nanocapsules, microspheres, beads, and lipid-based systems including oil-in-water emulsions, micelles, mixed micelles, and liposomes. The preferred colloidal system of this invention is a liposome. Liposomes are artificial membrane vesicles which are useful as delivery vehicles in vitro and in vivo. It has been shown that large unilamellar vesicles (LUV), which range in size from 0.2-4.0 um can encapsulate a substantial percentage of an aqueous buffer containing large macromolecules. RNA, DNA and intact virions can be encapsulated within the aqueous interior and be delivered to cells in a biologically active form, Fraley, et al., Trends Biochem. Sci., 6, 77 (1981). In addition to mammalian cells, liposomes have been used for delivery of polynucleotides in plant, yeast and bacterial cells. In order for a liposome to be an efficient gene transfer vehicle, the following characteristics should be present: (1) encapsulation of the genes of interest at high efficiency while not compromising their biological activity; (2) preferential and substantial binding to a target cell in comparison to non-target cells; (3) delivery of the aqueous contents of the vesicle to the target cell cytoplasm at high efficiency; and (4) accurate and effective expression of genetic information, Mannino, et al., Biotechniques, 6, 682, (1988).

[0107] These and other uses of antisense methods to inhibit the in vivo translation of genes are well known in the art (e.g., De Mesmaeker, et al., Backbone modifications in oligonucleotides and peptide nucleic acid systems, Curr. Opin. Struct. Biol., 5, 343-355 (1995); Gewirtz, A. M., et al., Facilitating delivery of antisense -oligodeoxynucleotides: Helping antisense deliver on its promise, Proc. Natl. Acad. Sci., U.S.A., 93, 3161-3163 (1996b); Stein, C. A., A discussion of G-tetrads, Exploiting the potential of antisense: beyond phosphorothioate oligodeoxynucleotides, Chem. and Biol., 3, 319-323 (1996).

### V. Diagnostic or Prognostic Methods

[0108] Expression of AMP may be used as a diagnostic marker for the prediction or identification of an angiogenesis mediated disorder. For example, a cell or tissue sample may be assayed for the expression levels of an AMP by any of the methods described herein and compared to the expression level found in normal health tissue. Such methods may be used to diagnose or identify angiogenesis mediated disorders.

[0109] Expression of AMP may also be used as a marker for monitoring that status, that is the progression, of an angiogenesis mediated disorder. Expression or activity of the AMP or nucleotides encoding the same may also used to track or predict the progress or efficacy of a treatment regime in a patient. For instance, a patient's progress or response to a given drug may be monitored by measuring gene expression of an AMP of the invention in a cell or tissue sample after treatment or administration of the drug. The expression of AMP in the post-treatment sample may then be compared to gene expression from the same patient before treatment.

### VI. Transgenic Animals

[0110] Transgenic animals containing mutant, knock-out or modified genes corresponding to AMP are also included in the invention. Transgenic animals are genetically modified animals into which recombinant, exogenous or cloned genetic material has been experimentally transferred. Such genetic material is often referred to as a transgene. The nucleic acid sequence of the transgene may be integrated either at a locus of a genome where that particular nucleic acid sequence is not otherwise normally found or at the normal locus for the transgene. The transgene may consist of nucleic acid sequences derived from the genome of the same species or of a different species than the species of the target animal.

[0111] The term “germ cell line transgenic animal” refers to a transgenic animal in which the genetic alteration or genetic information was introduced into a germ line cell, thereby conferring the ability of the transgenic animal to transfer the genetic information to offspring. If such offspring in fact possess some or all of that alteration or genetic information, then they too are transgenic animals.

[0112] The alteration or genetic information may be foreign to the species of animal to which the recipient belongs, foreign only to the particular individual recipient, or may be genetic information already possessed by the recipient. In the last case, the altered or introduced gene may be expressed differently than the native gene.

[0113] Transgenic animals can be produced by a variety of different methods including transfection, electroporation, microinjection, gene targeting in embryonic stem cells and recombinant viral and retroviral infection (see, e.g., U.S. Pat. Nos. 4,736,866 & 5,602,307; Mullins et al., Hypertension, 22, 630-633 (1993); Brenin et al., Surg. Oncol. 6, 99-110 (1997); Tuan, Recombinant Gene Expression Protocols, Methods in Molecular Biology, Humana Press (1997)).

[0114] A number of recombinant or transgenic mice have been produced, including those which express an activated oncogene sequence, U.S. Pat. No. 4,736,866; express simian SV40 T-antigen, U.S. Pat. No. 5,728,915; lack the expression of interferon regulatory factor 1 (IRF-1), U.S. Pat. No. 5,731,490; exhibit dopaminergic dysfunction, U.S. Pat. No. 5,723,719; express at least one human gene which participates in blood pressure control, U.S. Pat. No. 5,731,489; display greater similarity to the conditions existing in naturally occurring Alzheimer's disease, U.S. Pat. No. 5,720,936; have a reduced capacity to mediate cellular adhesion, U.S. Pat. No. 5,602,307; possess a bovine growth hormone gene, Clutter et al., Genetics, 143, 1753-1760 (1996); or are capable of generating a fully human antibody response, McCarthy, Lancet 349, 405-406 (1997).

[0115] While mice and rats remain the animals of choice for most transgenic experimentation, in some instances it is preferable or even necessary to use alternative animal species. Transgenic procedures have been successfully utilized in a variety of non-murine animals, including sheep, goats, pigs, dogs, cats, monkeys, chimpanzees, hamsters, rabbits, cows and guinea pigs (see, e.g., Kim et al., Mol. Reprod. Dev., 46, 515-526 (1997); Houdebine, Reprod. Nutr. Dev., 35, 609-617 (1995); Petters, Reprod. Fertil. Dev., 6, 643-645 (1994); Schnieke, et al., Science, 278, 2130-2133 (1997); and Amoah J., Animal Science, 75, 578-585 (1997)).

[0116] The method of introduction of nucleic acid fragments into recombination competent mammalian cells can be by any method that favors co-transformation of multiple nucleic acid molecules. Detailed procedures for producing transgenic animals are readily available to one skilled in the art, including the disclosures in U.S. Pat. Nos. 5,489,743 & 5,602,307.

### VII. Compositions

[0117] The compositions of the invention comprise: (a) a safe and effective amount of an AMP, or agent modulating AMP; and (b) a pharmaceutically-acceptable carrier. AMPs and said agents are formulated by standard pharmaceutical formulation techniques such as those disclosed in Remington's Pharmaceutical Sciences, Mack Publishing Company, Easton, Pa., latest edition.

[0118] A “safe and effective amount” of an AMP, or agent modulating AMP, is an amount that is effective, to either stimulate or inhibit angiongenesis, in an animal, preferably a mammal, more preferably a human subject, in need thereof, without undue adverse side effects (such as toxicity, irritation, or allergic response), commensurate with a reasonable benefit/risk ratio when used in the manner of this invention. The specific “safe and effective amount” will, obviously, vary with such factors as the particular condition being treated, the physical condition of the subject, the duration of treatment, the nature of concurrent therapy (if any), the specific dosage form to be used, the carrier employed, the solubility of the AMP or agent therein, and the dosage regimen desired for the composition. One skilled in the art may use the following teachings to determine a “safe and effective amount” in accordance with the present invention. Spilker B., Guide to Clinical Studies and Developing Protocols, Raven Press Books, Ltd., New York, 7-13, 54-60 (1984); Spilker B., Guide to Clinical Trials, Raven Press, Ltd., New York, 93-101 (1991); Craig C., and R. Stitzel, eds., Modem Pharmacology, 2d ed., Little, Brown and Co., Boston, 127-33 (1986); T. Speight, ed., Avery's Drug Treatment: Principles and Practice of Clinical Pharmacology and Therapeutics, 3d ed., Williams and Wilkins, Baltimore, 50-56 (1987); R. Tallarida, R. Raffa and P. McGonigle, Principles in General Pharmacology, Springer-Verlag, New York, 18-20 (1988).

[0119] In addition to the subject AMP or agent, the compositions of the subject invention contain a pharmaceutically-acceptable carrier. The term “pharmaceutically-acceptable carrier,” as used herein, means one or more compatible solid or liquid filler diluents or encapsulating substances which are suitable for administration to an animal, preferably a mammal, more preferably a human. The term “compatible”, as used herein, means that the components of the composition are capable of being commingled with the subject AMP or agent, and with each other respectively, in a manner such that there is no interaction that would substantially reduce the pharmaceutical efficacy of the composition under ordinary use situations. Pharmaceutically-acceptable carriers must, of course, be of sufficiently high purity and sufficiently low toxicity to render them suitable for administration to the animal, preferably a mammal, more preferably a human being treated.

[0120] Some examples of substances which can serve as pharmaceutically-acceptable carriers or components thereof are: sugars, such as lactose, glucose and sucrose; starches, such as corn starch and potato starch; cellulose and its derivatives, such as sodium carboxymethyl cellulose, ethyl cellulose, and methyl cellulose; powdered tragacanth; malt; gelatin; talc; solid lubricants, such as stearic acid and magnesium stearate; calcium sulfate; vegetable oils, such as peanut oil, cottonseed oil, sesame oil, olive oil, corn oil and oil of theobroma; polyols such as propylene glycol, glycerine, sorbitol, mannitol, and polyethylene glycol; alginic acid; emulsifiers, such as the Tweens®; wetting agents, such sodium lauryl sulfate; coloring agents; flavoring agents; tableting agents, stabilizers; antioxidants; preservatives; pyrogen-free water; isotonic saline; and phosphate buffer solutions.

[0121] The choice of a pharmaceutically-acceptable carrier to be used in conjunction with the subject compound is basically determined by the way the AMP or agent is to be administered.

[0122] If the subject AMP or agent is to be injected, the preferred pharmaceutically-acceptable carrier is sterile, physiological saline, with a blood-compatible colloidal suspending agent, the pH of which has been adjusted to about 7.4.

[0123] In particular, pharmaceutically-acceptable carriers for systemic administration include sugars, starches, cellulose and its derivatives, malt, gelatin, talc, calcium sulfate, vegetable oils, synthetic oils, polyols, alginic acid, phosphate buffer solutions, emulsifiers, isotonic saline, and pyrogen-free water. Preferred carriers for parenteral administration include propylene glycol, ethyl oleate, pyrrolidone, ethanol, and sesame oil. Preferably, the pharmaceutically-acceptable carrier, in compositions for parenteral administration, comprises at least about 90% by weight of the total composition.

[0124] The compositions of this invention are preferably provided in unit dosage form. As used herein, a “unit dosage form” is a composition of this invention containing an amount of an AMP or agent that is suitable for administration to an animal, preferably a mammal, more preferably a human subject, in a single dose, according to good medical practice. These compositions preferably contain from about 0.1 mg (milligrams) to about 1000 mg, more preferably from about 10 mg to about 500 mg, more preferably from about 10 mg to about 300 mg, of an AMP or agent.

[0125] The compositions of this invention may be in any of a variety of forms, suitable, for example, for oral, rectal, topical, nasal, ocular or parenteral administration. Depending upon the particular route of administration desired, a variety of pharmaceutically-acceptable carriers well-known in the art may be used. These include solid or liquid fillers, diluents, hydrotropes, surface-active agents, and encapsulating substances. Optional pharmaceutically-active materials may be included, which do not substantially interfere with the angiogenesis modulating activity of the AMP or agent of the invention. The amount of carrier employed in conjunction with the AMP or agent is sufficient to provide a practical quantity of material for administration per unit dose of the AMP or agent, respectively. Techniques and compositions for making dosage forms useful in the methods of this invention are described in the following references: Modern Pharmaceutics, Chapters 9 and 10 (Banker & Rhodes, editors, 1979); Lieberman et al., Pharmaceutical Dosage Forms: Tablets, (1981); and Ansel, Introduction to Pharmaceutical Dosage Forms, 2d Edition (1976).

[0126] Various oral dosage forms can be used, including such solid forms as tablets, capsules, granules and bulk powders. These oral forms comprise a safe and effective amount, usually at least about 5%, and preferably from about 25% to about 50%, of AMP. Tablets can be compressed, tablet triturates, enteric-coated, sugar-coated, film-coated, or multiple-compressed, containing suitable binders, lubricants, diluents, disintegrating agents, coloring agents, flavoring agents, flow-inducing agents, and melting agents. Liquid oral dosage forms include aqueous solutions, emulsions, suspensions, solutions and/or suspensions reconstituted from non-effervescent granules, and effervescent preparations reconstituted from effervescent granules, and containing suitable solvents, preservatives, emulsifying agents, suspending agents, diluents, sweeteners, melting agents, coloring agents and flavoring agents.

[0127] The pharmaceutically-acceptable carrier suitable for the preparation of unit dosage forms for peroral administration are well-known in the art. Tablets typically comprise conventional pharmaceutically-compatible adjuvants as inert diluents, such as calcium carbonate, sodium carbonate, mannitol, lactose and cellulose; binders such as starch, gelatin and sucrose; disintegrants such as starch, alginic acid and croscarmelose; lubricants such as magnesium stearate, stearic acid and talc. Glidants such as silicon dioxide can be used to improve flow characteristics of the powder mixture. Coloring agents, such as the FD&C dyes, can be added for appearance. Sweeteners and flavoring agents, such as aspartame, saccharin, menthol, peppermint, and fruit flavors, are useful adjuvants for chewable tablets. Capsules typically comprise one or more solid diluents disclosed above. The selection of carrier components depends on secondary considerations like taste, cost, and shelf stability, which are not critical for the purposes of the subject invention, and can be readily made by a person skilled in the art. In general, the formulation will include the protein (or chemically modified protein), and inert ingredients which allow for protection against the stomach environment, and release of the biologically active material in the intestine.

[0128] The AMP may be chemically modified so that oral delivery of the derivative is efficacious. Generally, the chemical modification contemplated is the attachment of at least one moiety to the protein molecule itself, where said moiety permits (a) inhibition of proteolysis; and (b) uptake into the blood stream from the stomach or intestine. Also desired is the increase in overall stability of the protein and increase in circulation time in the body. Examples of such moieties include: polyethylene glycol, copolymers of ethylene glycol and propylene glycol, carboxymethyl cellulose, dextran, polyvinyl alcohol, polyvinyl pyitolidone and polyproline, Abuchowski et al., supra (1981); Newmark et al., J. Appl. Biochem., 4:185-189 (1982). Other polymers that could be used are poly-1,3-dioxolane and poly-1,3,6-tioxocane. Preferred for pharmaceutical usage, as indicated above, are polyethylene glycol moieties.

[0129] For the AMP, the location of release may be the stomach, the small intestine (the duodenum, the jejunem, or the ileum), or the large intestine. One skilled in the art has available formulations which will not dissolve in the stomach, yet will release the material in the duodenum or elsewhere in the intestine. Preferably, the release will avoid the deleterious effects of the stomach environment, either by protection of the protein (or derivative) or by release of the biologically active material beyond the stomach environment, such as in the intestine.

[0130] To ensure full gastric resistance, a coating impermeable to at least pH 5.0 is preferred. Examples of the more common inert ingredients that are used as enteric coatings are cellulose acetate trimellitate (CAT), hydroxypropylmethylcellulose phthalate (HPMCP), HPMCP 50, HPMCP 55, polyvinyl acetate phthalate (PVAP), Eudragit L30D, Aquateric, cellulose acetate phthalate (CAP), Eudragit L, Eudragit S, and Shellac. These coatings may be used as mixed films.

[0131] Peroral compositions also include liquid solutions, emulsions, suspensions, and the like. The pharmaceutically-acceptable carriers suitable for preparation of such compositions are well known in the art. Typical components of carriers for syrups, elixirs, emulsions and suspensions include ethanol, glycerol, propylene glycol, polyethylene glycol, liquid sucrose, sorbitol and water. For a suspension, typical suspending agents include methyl cellulose, sodium carboxymethyl cellulose, Avicel® RC-591, tragacanth and sodium alginate; typical wetting agents include lecithin and polysorbate 80; and typical preservatives include methyl paraben and sodium benzoate. Peroral liquid compositions may also contain one or more components such as sweeteners, flavoring agents and colorants disclosed above.

[0132] Such compositions may also be coated by conventional methods, typically with pH or time-dependent coatings, such that the subject compound is released in the gastrointestinal tract in the vicinity of the desired topical application, or at various times to extend the desired action. Such dosage forms typically include, but are not limited to, one or more of cellulose acetate phthalate, polyvinylacetate phthalate, hydroxypropyl methyl cellulose phthalate, ethyl cellulose, Eudragit® coatings, waxes and shellac.

[0133] Compositions of the subject invention may optionally include other active agents. Non-limiting examples of active agents are listed in WO 99/15210.

[0134] Other compositions useful for attaining systemic delivery of the subject compounds include sublingual, buccal, suppository, and nasal dosage forms. Such compositions typically comprise one or more of soluble filler substances such as sucrose, sorbitol and mannitol; and binders such as acacia, microcrystalline cellulose, carboxymethyl cellulose and hydroxypropyl methyl cellulose. Glidants, lubricants, sweeteners, colorants, antioxidants and flavoring agents disclosed above may also be included.

[0135] The compositions of this invention can also be administered topically to a subject, e.g., by the direct laying on or spreading of the composition on the epidermal or epithelial tissue of the subject, or transdermally via a “patch.” An example of a suitable patch applicator is described in U.S. patent application Ser. No. 10/054,113. Such compositions include, for example, lotions, creams, solutions, gels and solids. These topical compositions preferably comprise a safe and effective amount, usually at least about 0.1%, and preferably from about 1% to about 5%, of the AMP. Suitable carriers for topical administration preferably remain in place on the skin as a continuous film, and resist being removed by perspiration or immersion in water. Generally, the carrier is organic in nature and capable of having dispersed or dissolved therein the AMP. The carrier may include pharmaceutically-acceptable emollients, emulsifiers, thickening agents, solvents and the like.

### VIII. Methods of Administration

[0136] This invention also provides methods of treating angiogenesis elevated disorders or angiogenesis reduced disorders in a human or other animal subject, by administering a safe and effective amount of an AMP or agent modulating AMP to said subject. The methods of the invention are useful in treating or preventing disorders described above.

[0137] Compositions of this invention can be administered topically or systemically. Systemic application includes any method of introducing AMP or agent into the tissues of the body, e.g., intra-articular (especially in treatment of rheumatoid arthritis), intrathecal, epidural, intramuscular, transdermal, intravenous, intraperitoneal, subcutaneous, sublingual, rectal, and oral administration.

[0138] The specific dosage of AMP or agent to be administered, as well as the duration of treatment, and whether the treatment is topical or systemic are interdependent. The dosage and treatment regimen will also depend upon such factors as the specific AMP or agent used, the treatment indication, the ability of the AMP or agent to reach minimum inhibitory concentrations at the site of the tissue in need of treatment, the personal attributes of the subject (such as weight), compliance with the treatment regimen, and the presence and severity of any side effects of the treatment.

[0139] Typically, for a human adult (weighing approximately 70 kilograms), from about 1 mg to about 3000 mg, more preferably from about 5 mg to about 1000 mg, more preferably from about 10 mg to about 100 mg, of AMP or agent are administered per day for systemic administration. It is understood that these dosage ranges are by way of example only, and that daily administration can be adjusted depending on the factors listed above.

[0140] Topical administration can be used to deliver the AMP or agent systemically, or to treat a subject locally. The amounts of AMP or agent to be topically administered depends upon such factors as skin sensitivity, type and location of the tissue to be treated, the composition and carrier (if any) to be administered, the particular AMP or agent to be administered, as well as the particular disorder to be treated and the extent to which systemic (as distinguished from local) effects are desired.

[0141] For localized conditions, topical administration is preferred. For example, to treat a retinal/choroidal neovascularization disease, direct application to the affected eye may employ a formulation as eyedrops or aerosol. For corneal treatment, the compounds of the invention can also be formulated as gels, drops or ointments, or can be incorporated into collagen or a hydrophilic polymer shield. The materials can also be inserted as a contact lens or reservoir or as a subconjunctival formulation. For treatment of a skin disease, the AMP or agent is applied locally and topically, in a gel, paste, salve or ointment. For treatment of oral diseases, the AMP or agent may be applied locally in a gel, paste, mouth wash, or implant. The mode of treatment thus reflects the nature of the condition and suitable formulations for any selected route are available in the art.

[0142] The AMP or agent of the present invention can be targeted to specific locations where treatment is needed by using targeting ligands. For example, to focus AMP or agent to inhibit angiogenesis in a tumor, the AMP or agent is conjugated to an antibody or fragment thereof which is immunoreactive with a tumor marker as is generally understood in the preparation of immunotoxins in general. The targeting ligand can also be a ligand suitable for a receptor which is present on the tumor. Any targeting ligand which specifically reacts with a marker for the intended target tissue can be used. Methods for coupling the invention compound to the targeting ligand are well known and are similar to those described below for coupling to carrier. The conjugates are formulated and administered as described above.

[0143] AMP or agent may be administered via a controlled release. For example, the AMP or agent may be administered using intravenous infusion, an implantable osmotic pump, a transdermal patch, liposomes, or other modes of administration. In one embodiment, a pump may be used, Langer et al., eds., Medical Applications of Controlled Release, CRC Pres., Boca Raton, Fla. (1974); Sefton, CRC Crit. Ref. Biomed. Eng., 14, 201 (1987); Buchwald et al., Surgery, 88, 507 (1980); Saudek et al., N. Engl. J. Med., 321, 574 (1989). In another embodiment, polymeric materials can be used (see, Langer, supra (1974); Sefton, supra (1987); Smolen et al., eds., Controlled Drug Bioavailability, Drug Product Design and Performance, Wiley, N.Y. (1984); Ranger et al., J. Macromol. Sci. Rev. Macromol. Chem., 23, 61 (1983); see also Levy et al., Science, 228, 190 (1985); During et al., Ann. Neurol., 25, 351 (1989); Howard et al., J. Neurosurg., 71, 105 (1989)). In yet another embodiment, a controlled release system can be placed in proximity of the therapeutic target thus requiring only a fraction of the systemic dose (see. e.g., Goodson, in Medical Applications of Controlled Release, 2, 115-138 (1984)). Other controlled release systems are discussed in the review by Langer, Science, 249, 1527-1533 (1990). In another embodiment, the therapeutic compound can be delivered in a vesicle, in particular a liposome (see Langer, 1990, supra); Treat et al., in Liposomes in the Therapy of Infectious Disease and Cancer, Lopez-Berestein and Fidler (eds.), Liss, New York, 353-365 (1989); Lopez-Berestein, 317-327; see generally ibid.).

[0144] In all of the foregoing, of course, the AMPs or agents of the invention can be administered alone or as mixtures, and the compositions may further include additional drugs or excipients as appropriate for the indication.

### IX. Kits

[0145] The present invention includes a kit for preventing or treating an angiogenesis mediated disorder comprising: (a) an AMP or agent modulating AMP in a unit dose form; (b) usage instructions; and (c) optionally a package containing components (a) and (b). Such a kit preferably includes a number of unit dosages. Such kits can include a card having dosages oriented in the order of their intended use. An example of such a kit is a “blister pack.” Blister packs are well known in the packaging industry and are widely used for packaging pharmaceutical unit dosage forms. If desired, a memory aid can be provided, for example in the form of numbers, letters, or other markings or with a calendar insert, designating the days in the treatment schedule in which the dosages can be administered. A non-limiting example of a kit is described in WO 01/45636. Treatments schedules are within the purview of those skilled in the medicinal arts.

### EXAMPLES

### 1. Introduction

[0146] To better understand the molecular mechanisms of angiogenesis, we utilized a proteomic approach to try to improve our understanding of this complex process.

[0147] The rat cornea model of angiogenesis is one of the most extensively studied and widely accepted models of blood vessel growth, McCracken, J. S. et al., Lab. Invest., 41, 519-530 (1979); Klintworth, G. K., Int. Ophthalmol. Clin., 23, 27-39 (1981); Kenyon, K. R., The Cornea. Scientific Foundations and Clinical Practice, Little, Brown and Co., Boston, 63-98 (1987); Burger, P. C. et al., Lab. Invest., 45, 328-335 (1981); Burger, P. C. et al., Lab. Invest., 48, 169-180 (1983); Ross, L. L. et al., Exp. Eye Res., 61, 435-450 (1995). This model is attractive to researchers because it provides an in vivo environment in which to study this complex process with convenient access to the corneal tissue and the highly visible, developing vasculature, Klintworth, G. K. et al., Int. Ophthalmol. Clin., 23, 27-39 (1983). The rat cornea model of angiogenesis was selected for our proteome analysis for three reasons. First, the cornea is normally an avascular tissue that can be stimulated to undergo angiogenesis in response to silver nitrate cauterization, Ross, L. L. et al., Exp. Eye Res., 61, 435-450 (1995); Haynes, W. L. et al., Invest. Ophthalmol. Vis. Sci., 30, 1588-1593 (1989); Scroggs, M. W. et al., Invest. Ophthalmol. Vis. Sci., 32, 2105-2111 (1991). Therefore, we can compare protein expression profiles between angiogenic and non-angiogenic tissues to detect changes in protein expression. Second, the time course of angiogenesis following cauterization is highly reproducible and well characterized so that we can examine changes in protein expression at all stages of blood vessel formation, from the initial vascular sprouting through smooth muscle recruitment and vessel maturation, Proia, A.D. et al, Lab. Invest., 58, 473-479 (1988). Lastly, an in vivo model like this provides a more physiologic approach to angiogenesis than the available in vitro models.

[0148] We present the protein expression profiles from the rat cornea at various stages of angiogenesis. We describe two distinct patterns of protein expression during the time course of blood vessel formation. Lastly, we identify proteins that are differentially expressed during angiogenesis by matrix-assisted laser desorption ionization time-of-flight and high pressure liquid chromatography-coupled electrospray ionization tandem mass spectrometry.

### 2. Materials and Methods

[0149] 2.1. Rat Cornea Model of Angiogenesis

[0150] 30 Zivic-Miller Sprague-Dawley rats (200-224 gram females) were used for these studies. Rats were anesthetized using diethyl ether and given 0.1 mg of butorphanol intraperitoneally. The right eye of each animal was cauterized by pressing an applicator stick coated with 75% silver nitrate/25% potassium nitrate (Graham-Field Surgical Co., Inc., New Hyde Park, N.Y.) to the center of the cornea for 5 seconds to stimulate angiogenesis as previously described in Ross, L. L. et al., Exp. Eye Res., 61, 435-450 (1995); Haynes, W. L. et al., Invest. Ophthalmol. Vis. Sci., 30, 1588-1593 (1989); Scroggs, M. W. et al., Invest. Ophthalmol. Vis. Sci., 32, 2105-2111 (1991), while the untreated, left eye of each animal served as a control. At each time point (days 2, 3, 4, 6, 7 and 15 post-cautery), 5 rats were euthanized by asphyxiation in a carbon dioxide chamber. Both eyes of each animal were enucleated and the corneoscleral rims removed as previously described in Ross, L. L. et al. Exp. Eye Res., 61, 435-450 (1995); Haynes, W. L. et al., Invest. Ophthalmol. Vis. Sci., 30, 1588-1593 (1989); Scroggs, M. W. et al Invest. Ophthalmol. Vis. Sci., 32, 2105-2111 (1991). Corneas were immediately frozen at −80° C. for 2-dimensional electrophoresis analysis. In a parallel experiment at days 0, 2, 4, 7, and 15 post-cautery, rats were sacrificed and perfused with 10-20 ml of a mixture of 10% Higgins Drawing Ink (Faber-Castell Corp., Newark, N.J.) mixed with 11% gelatin in lactated Ringer's solution prior to harvesting corneas to visualize the vasculature as previously described in Haynes, W. L. et al., Invest. Ophthalmol. Vis. Sci., 30, 1588-1593 (1989); Scroggs, M. W. et al., Invest. Ophthalmol. Vis. Sci., 32, 2105-2111 (1991). Corneal flat preparations were prepared and mounted on microscope slides for imaging.

[0151] 2.2. Sample Preparation and 2-Dimensional Gel Electrophoresis

[0152] Corneas were individually solubilized in 50 microliters of sample buffer (9M urea, 2% CHAPS, 2% DTT, 0.1% SDS, trace bromophenol blue, and 0.5 tablet/ml of Complete protease inhibitor cocktail tablet (Roche Molecular Biochemicals, Indianapolis, Ind.)) by grinding them in a liquid nitrogen-chilled mortar and pestle. Protein extracts were cleared by centrifugation at 14,000 rpm for 5 minutes. Sample volumes were increased to 400 μl with isoelectric focusing buffer (9M urea, 2% CHAPS, 2% dithiothreitol, and 1% Pharmalyte, pH 3-10 (Amersham Pharmacia Biotech, Piscataway, N.J.)). Samples were loaded overnight onto 18 cm Immobiline Drystrip gels, pH 4-7 (Amersham Pharmacia Biotech, Piscataway, N.J.) and resolved by isoelectric focusing at 3,500 volts for 15 hours. Samples strips were then equilibrated for 30 minutes in Tris Acetate Equilibration buffer (Genomic,Solutions, Ann Arbor, Mich.) supplemented with 1% sodium dodecyl sulfate and 0.77% dithiothreitol. Following equilibration, strips were loaded onto 10% tricine gels (Genomic Solutions, Ann Arbor, Mich.) and resolved in the second dimension at 1100 milliwatts per gel at 4° C. Proteins on gels were visualized using the Investigator Silver Stain kit (Genomic Solutions, Ann Arbor, Mich.) according to the manufacturer except that gluteraldehyde was omitted from the fixation step since this crosslinking reagent interferes with extraction of the proteins for identification.

[0153] 2.3. Image Analysis and Protein Identification

[0154] Silver stained 2-DE gels were scanned using a Personal Densitometer SI (Amersham Pharmacia Biotech, Piscataway, N.J.). The digitized protein expression profiles at each time point post-cautery were compared in triplicate to controls using the Z3 2D gel image analysis software (Compugen, Jamesburg, N.J.). Differentially-expressed proteins that varied greater than 2-fold in level of expression were excised from the gels and destained in a solution of freshly prepared 50 mM sodium thiosulfate and 15 mM potassium ferricyanide as previously described in Gharahdaghi, F. et al., Electrophoresis, 20, 601-605 (1999). Proteins were then digested with 20 ng of sequencing grade porcine trypsin (Promega, Madison, Wis.) in 50 mM ammonium bicarbonate overnight to generate tryptic peptides. The peptide digests were recovered by 100 microliters of 60% acetonitrile, 0.1% trifluroacetic acid solution. Shevchenko, A. et al., Anal. Chem., 68, 850-858 (1996). Samples were dried extensively in a speedvac to remove residual ammonium bicarbonate. Peptides were resuspended in 5 μl of a 50% acetonitrile/0.3% trifluoroacetic acid solution. 0.75 μl (15%) of each sample was combined with 1.5 μl of matrix solution (10 mg/ml α-cyano-4-hydroxycinnamic acid, 60% acetonitrile, and 0.3% trifluoroacetic acid) and analyzed by matrix-assisted laser desorption ionization time-of-flight mass spectrometry. Spectra were collected on a Voyager DE-STR matrix-assisted laser desorption ionization time-of-flight mass spectrometer (Applied Biosystems, Framingham, Mass.) in positive ion, reflector mode with delayed ion extraction using the following conditions: nitrogen laser at 337 nm; accelerating voltage at 20 kV; grid voltage at 75%; ion delay of 150 nsec and a mass range of 800-3200 Da. Internal mass calibration was performed using peptides arising from auto-digestion of the porcine trypsin. The MS-Fit algorithm from the ProteinProspector (v3.4.1) search engine (http://prospector.ucsf.edu/) purchased from University of California-San Francisco was used for protein identification, Clauser, K. R. et al., Anal. Chem., 71, 2871-2878 (1999). In the event that the protein identification was ambiguous after the matrix-assisted laser desorption ionization time-of-flight step, the remaining 85% of the peptide in each sample was analyzed by capillary liquid chromatography electrospray ionization tandem mass spectrometry with an LCPackings Ultimate capillary liquid chromatography system equipped with a FAMOS micro-autosampler and a 5 cm×300 μm i.d. PepMap C18 column (LCPackings, San Francisco, Calif.) coupled to a Finnigan LCQ^{Deca} ion trap mass spectrometer (ThermoFinnigan, San Jose, Calif.). Data were collected and analyzed using Finnigan Xcalibur v. 1.2 software in data-dependent scan mode such that any peptide signal over 1×10⁵ intensity triggered the automated acquisition of a tandem mass spectrometry fragmentation spectrum for that peptide. The collective tandem mass spectrometry spectra for each capillary liquid chromatography-coupled tandem mass spectrometry run were searched against the National Center for Biotechnology Information nr database using Mascot Daemon (v. 1.7.1) as a client attached to the Mascot search protocol (Matrix Science, Ltd.; http://www.matrixscience.com) Perkins, et al., Electrophoresis, 20, 3551-3567 (1999).

### 3. Results

[0155] 3.1. Progression of Angiogenesis in the Rat Cornea Model.

[0156] Silver nitrate cauterization of the rat eye has previously been used to promote angiogenesis in the normally avascular cornea, Ross, L. L. et al., Exp. Eye Res., 61, 435-450 (1995); Haynes, W. L. et al., Invest. Ophthalmol. Vis. Sci., 30, 1588-1593 (1989); Scroggs, M. W. et al., Invest. Ophthalmol. Vis. Sci., 32, 2105-2111 (1991); Proia, A. D. et al., Lab. Invest., 58, 473-479 (1988). This method produces a discrete, central lesion on the cornea resulting in necrosis of the corneal epithelium and stroma. In the day 0, non-cauterized cornea, only the limbal vessels at the periphery of the cornea are seen (FIG. 1.) In just 24 hours after the injury, these limbal vessels appear slightly engorged. Within 48 hours the limbal arcades are extended measurably further into the cornea with numerous short vascular sprouts projecting centrally toward the site of injury (FIG. 2, Day 2). By 3 and 4 days post cautery, this dense brushwork of vessels elongates evenly into the cornea from all sides (FIG. 3). Regression and remodeling of these new blood vessels occurs between days 6 and 7 as redundant vessels are “pruned” (FIG. 4) until only a few stable, mature vessels remain in the cornea (FIG. 5). Identification of the differentially-expressed proteins in this corneal model during the various stages of blood vessel growth will likely lead to a better understanding of the process of angiogenesis.

[0157] 3.2 Differential Protein Expression

[0158] As this is the first reported application of proteome analysis on corneal tissue, several of the conditions for sample preparation and solubilization were developed de novo. We found that our protocol (described in Materials and methods) consistently generates enough protein from a single rat cornea to be visualized by 2-dimensional electrophoresis. To determine if our approach would be sensitive enough to detect differential protein expression using this model, we first examined protein expression profiles in angiogenic corneas at day 3 post-cautery (FIG. 7). This time point was selected because corneas at this time point are known to contain abundant blood vessel growth (see FIG. 3). These protein expression profiles were compared to those of non-cauterized controls (FIG. 6) to look for changes in protein expression. In this initial study, 11 spots were detected and identified that were down-regulated in response to silver nitrate cauterization/angiogenesis, while 31 spots were identified that were upregulated after cauterization as compared to control corneal proteins. These 42 spots accounted for 19 distinct proteins, as some of the spots were modified versions of the same protein (Table II). Therefore, this model is sufficient for proteome analysis as changes in corneal protein expression can be visualized by 2-dimensional electrophoresis and differentially-expressed proteins can be identified by Matrix-assisted laser desorption ionization time-of-flight mass spectrometry.

[0159] 3.3 Differential Protein Expression in All Stages of Angiogenesis.

[0160] Analysis of the rat cornea proteome provides a “snapshot” of the cellular proteins expressed at any given time. However, to fully characterize and analyze a dynamic process like angiogenesis, experiments should be performed that capture the protein expression profiles of the cornea at the various stages of blood vessel development. Therefore, we designed a time course experiment to examine the changes in protein expression at the critical time points throughout the entire angiogenic process. Corneas were harvested in triplicate at day 0 and at days 0, 2, 4, 6, 7, and 15 post-cautery and their protein expression profiles were visualized by 2-dimensional electrophoresis (FIG. 8-13, respectively).

[0161] Protein spots that changed greater than 2-fold in level of expression (relative to control) throughout the time course were excised for identification. 101 spots were successfully identified from this time course experiment. However, several of these spots represented modified versions or fragments of the same protein. For example, 19 of the proteins were found to be fragments of collagen. This is not surprising when one considers that the cornea consists of an anterior squamous epithelium of 5-7 cell layers overlying a relatively thick extracellular stroma containing ordered collagen fibers, Xu, J. et al., J. Biol. Chem., 275, 24645-24652 (2000). In fact, these multiple fragments of collagen might be indicative of matrix metalloproteinase activities, which are already implicated during angiogenesis, Xu, J. et al., J. Cell Biol., 54, 1069-1079 (2001); Pepper, M. S., Arterioscler. Thromb. Vasc. Biol., 21, 1104-1117 (2001); John, A. et al., Pathol. Oncol. Res., 7, 14-23 (2001). A total of 48 distinct, differentially-expressed proteins were identified in this model of angiogenesis. These proteins are grouped according to their patterns of expression and listed in Table III.

### 4. Discussion

[0162] The term proteome, coined just a few years ago, Wasinger, V. C. et al., Electrophoresis, 16, 1090-1094 (1995), refers to all proteins present in a cell, tissue, or organism at any given time, including modified proteins arising from alternatively sliced transcripts or posttranslational modifications, Arrell, D. K. et al., Circ. Res., 88, 763-773 (2001). Since proteins are involved in nearly every cellular process, control every regulatory mechanism, become modified in disease (as the cause or effect), and provide targets for most drug treatments, Arrell, D. K et al., Circ. Res., 88, 763-773 (2001), it is imperative that we look to the proteome for a better understanding of a complex process like angiogenesis.

[0163] Angiogenesis research has traditionally focused on studies of gene regulation at the level of mRNA expression (i.e. the transcriptome). However, Anderson et at. have demonstrated that there is generally poor correlation between mRNA and cognate protein expression levels, Anderson, L. et al., Electrophoresis, 18, 533-537 (1997). In addition, many cellular processes are typically regulated through posttranslational modifications of proteins (e.g. phosphorylation), which would likely go undetected using solely a genomic approach. Therefore we utilized a proteomic approach in our studies to provide a better understanding of the process of angiogenesis in the rat cornea model.

[0164] In our proteome analysis of the rat cornea model, we identified more than 100 proteins that changed in expression level in response to silver nitrate cauterization/angiogenesis. These differentially-expressed proteins can be categorized into two basic groups: proteins that are down-regulated in response to silver nitrate cauterization/angiogenesis or proteins that become up-regulated. We might expect to find some of the down-regulated proteins to be natural inhibitors of angiogenesis. Hence, their down-regulation might enable/signal blood vessel growth to proceed. Similarly, we would predict some of the up-regulated proteins to be positive regulators of angiogenesis, blood vessel structural proteins, or blood components. Therefore, a comprehensive list of up-regulated proteins should include pro-angiogenic factors, matrix metalloproteinases, smooth muscle components, and important intracellular signaling molecules for endothelial cell migration and proliferation.

[0165] A majority of the proteins that we successfully identified are highly-abundant, proteins. In fact, several of these proteins are commonly seen in other studies of cardiovascular proteomics, Arrell, D. K. et al., Circ. Res., 88, 763-773 (2001). This is not surprising when one considers that current 2-dimensional electrophoresis and mass spectrometry technology in proteomics is somewhat limiting as less abundant, membrane-associated, and high molecular weight proteins are difficult to analyze, Washburn, M. P. et al., Curr. Opin. Microbiol., 3, 292-297 (2000); Gygi, S. P. et al., Proc. Natl. Acad. Sci. USA, 97, 9390-9395 (2000). Therefore, housekeeping proteins (>10,000 copies per cell), which constitute a significant portion of the cellular proteome, Blackstock, et al., Trends Biotech., 17, 121-127 (1999), are more frequently identified.

[0166] A notable trend in protein expression was observed in which a subset of proteins demonstrated a dramatic up-regulation by day 2 post-cautery, a peak in expression around day 6 or 7, and then a steady decline by day 15. The proteins that followed this pattern of expression were identified as hemopexin, serotransferrin, \tilde{α}1-macroglobulin, apolipoprotein(s), and albumin(s). Interestingly, all of these are predominantly blood proteins. This is not surprising when you consider that the cornea is transformed from an avascular tissue to a highly vascularized one, which would appear as an apparent up-regulation of these blood proteins. In the regression stages of angiogenesis as redundant vessels are resorbed (between days 7 and 15), the cornea becomes less highly vascularized which would explain the relative down-regulation of these proteins. This same pattern of expression would also be expected for structural proteins of these newly formed blood vessels. These findings validate ongoing efforts in proteomics in that they demonstrate that physiological changes can be detected at the level of the proteome.

[0167] In addition to the blood, structural, and house-keeping proteins, we also identified a number of other interesting proteins. Kininogen, phosphatidyl ethanolamine binding protein, heat shock protein 27, gelsolin, lipocortin I, lipocortin II, and RHO-GDP dissociation inhibitor-2 were all differentially expressed during the process of angiogenesis. Many of these can be linked to cellular proliferation and migration events that are required for angiogenesis and vascular remodeling, Colman, R. W., Biol. Chem., 382, .65-70 (2001); Hengst, U. et al., J. Biol. Chem., 276, 535-540 (2001); D'Amico, M. et al., FASEB J., 14, 1867-1869 (2000); Winston, J. S. et al., Breast Cancer Res. Treat., 65, 11-21 (2001); Hansen, R. K. et al., Biochem. Biophys. Res. Commun., 282, 186-193 (2001); Adra, C. N. et al., Genes Chromosomes Cancer, 8, 253-261 (1993). Therefore These proteins may importantly regulate the cellular events required for blood vessel assembly.

[0168] The rat cornea model of angiogenesis has been used previously to look for changes in gene expression in response to silver nitrate cauterization for the identification of important wound healing genes at early time points post-cautery, Ross, L. L. et al., Exp. Eye Res., 61, 435-450 (1995). A subtractive hybridization approach was used to identify 76 clones in the rat cornea whose corresponding mRNA levels increased in response to cauterization, Ross, L. L. et al., Exp. Eye Res., 61, 435-450 (1995). Of these clones, only aldehyde dehydrogenase and alpha crystallin were detected by our proteomic approach. However, in our studies the expression level of these proteins actually decreased in response to cauterization even though their cognate mRNAs were reported to increase. One potential explanation for our observation is that the decrease in expression of these proteins triggers a corresponding increase in gene transcription (and mRNA levels) to restore the protein levels to their pre-cauterized states. Regardless of the explanation, this lack of correlation underscores the importance of using a combination of both genomic and proteomic approaches to study complex biological systems like angiogenesis.

TABLE II

| Down-regulated proteins: | | Up-regulated proteins: | |
|---|---|---|---|
| Spot # | Protein ID | Spot # | Protein ID |
| 1 | calreticulin | 1, 2, 3 | serine protease |
| | precursor (CRP55) | | inhibitor 1 |
| 2, 3 | Keratin complex I, | 4, 6 | Hemopexin precursor |
| | acidic | | |
| 4 | Heat shock protein | 7, 10-18, 21, | Serum albumin |
| | 60 precursor | 28, 31 | precursor |
| 5, 6, | Aldehyde | 8, 9 | Class 3 aldehyde |
| 10 | dehydrogenase | | dehydrogenase |
| | class 3 | | complex with NAD |
| 7 | Capping protein | 19 | Myosin heavy chain, |
| | (actin filament) | | smooth muscle |
| 8 | Alcohol dehydro- | 20 | Apolipoprotein A-i |
| | genase, class IV | | |
| 9 | Heat shock prtein 70 | 22 | Calgranulin A |
| 11 | Ribosomal protein | 23, 24, 26 | Kallikrein-binding |
| | S6 kinase | | protein precursor |
| | | 25, 27 | Alpha-2-HS- |
| | | | glycoprotein |
| | | 29, 30 | beta actin |

[0169] TABLE III
Proteins that decrease post-cautery and remain lower than control levels:

| | |
|---|---|
| pro-collagen, type VII, αl | Aldehyde dehydrogenase, class 3 |
| (2 spots) | |
| collagen, α3 (VI) (5 spots) | beta actin |

Proteins that decrease post-cautery and then rebound:

| | |
|---|---|
| heat shock protein 70 | aldehyde dehydrogenase, class 3 (4 spots) |
| reticulocalbin (2 spots) | phosphatidyl ethanolamine binding protein |
| FIP2 | collagen, αl, type VI |
| macrophage capping protein | heat shock protein 27 |
| collagen, α3 (VI) | alpha crystallin A chain |
| heat shock protein 60 | |

Proteins that increase post-cautery and then remain higher than
control levels:

| | |
|---|---|
| gelsolin precursor | tropomyosin (2 spots) |
| serum albumin precursor | transthyretin precursor (pre-albumin) |
| (4 spots) | (2 spots) |
| beta actin (3 spots) | α-tropomyosin |
| cystatin beta | vimentin (3 spots) |
| vitamin D binding protein | fatty acid binding protein |
| precursor | |
| tropomyosin 4 | eukaryotic translation elongation factor |

Proteins that increase post-cautery, peak day 6-7, and then decline:

| | |
|---|---|
| gelsolin precursor | tropomyosin (2 spots) |
| t-kininogen (2 spots) | hemopexin precursor (2 spots) |
| serum albumin precursor | apolipoprotein C-IV |
| (14 spots) | |
| apolipoprotein A-IV precursor | pyruvate kinase (3 spots) |
| preprohaptoglobin (3 spots) | collagen α3 (VI) (2 spots) |
| galectin 7 | alpha-1-macroglobulin (3 spots) |
| lipocortin-III (annexin-III) | 40S ribosomal protein P40 |
| beta actin (5 spots) | alpha-2U-globulin precursor |
| serotransferrin precursor | lipocortin-I |
| apolipoprotein AI | phosphoglycerate kinase |
| apolipoprotein AI precursor | RHO GDP-dissociation inhibitor 2 |
| collagen α3 (VI) | Fab fragment of a rat antibody |
| malate dehydrogenase | calgranulin A |
| thioredoxin | |

### X. Miscellaneous

[0170] Except as otherwise noted, all amounts including quantities, percentages, portions, and proportions, are understood to be modified by the word “about”, and amounts are not intended to indicate significant digits.

[0171] Except as otherwise noted, the articles “a”, “an”, and “the” mean “one or more”.

[0172] All documents cited are, in relevant part, incorporated herein by reference; the citation of any document is not to be construed as an admission that it is prior art with respect to the present invention.

[0173] While particular embodiments of the present invention have been illustrated and described, it would be obvious to those skilled in the art that various other changes and modifications can be made without departing from the spirit and scope of the invention. It is therefore intended to cover in the appended claims all such changes and modifications that are within the scope of this invention.

The application's sequence listing, which the Patent Office published only in electronic form, follows.

SEQUENCE LISTING (308 sequences)

SEQ ID NO: 1 - DNA, 1882 bp, Rattus norvegicus
  CDS (36)..(1286)
cgggggccagtgtgccgccgccccctcggcccgccatgctcctttcggtgccgctcctgcttggcctcctcggcctggctgccgcagaccctgccatctatttcaaagagcagttcttggacggagatgcctggaccaaccgctgggtcgaatccaaacataagtctgattttggcaaattcgtcctcagttctggcaaattctacggggaccaggagaaggataaagggttgcagacaagccaagatgcccgattttacgcgctgtccgccagattcgaacccttcagcaacaagggccagacactggtggtacagttcaccgtgaagcatgagcagaatatcgactgtgggggcggctacgtgaagctgtttccgggtggcttggaccagaaggacatgcatggagactcagaatataacatcatgtttggtccggacatctgcggtcctggcaccaagaaggttcatgtcatctttaactacaagggcaagaacgtgctgatcaacaaggatatccggtgtaaggatgatgaattcacacatctatacacgctgattgtgcggccagacaacacctacgaggtgaaaattgacaacagccaggtggagtcgggctccttggaggatgattgggactttctgccgcccaagaagattaaggatcctgacgctgccaagccagaagactgggatgaacgagccaagattgatgaccccacagattccaagcctgaggactgggacaagccagagcacatccctgaccctgatgctaagaagcctgaggactgggacgaagagatggatggagagtgggaaccaccagtgattcaaaatcctgaatacaagggcgaatggaagccacgtcaaattgacaacccagattacaagggtacctggatacacccagagattgacaatcctgaatactcccccgatgcgaatatctatgcctatgatagttttgctgtactgggcttagacctctggcaggtcaagtctggcacaatttttgacaacttcctcatcaccaatgatgaggcctatgcagaggagtttggcaatgagacctggggtgtcaccaaggctgcagagaagcagatgaaggacaagcaggatgaggagcagaggcttaaggaagaagaagaagacaagaagcgtaaagaggaagaggaggccgaggataaagaggatgaggatgacagagatgaagatgaagatgaagaggatgagaaggaagaagatgaggaggatgccactggccaagccaaggatgagctgtagaggccacaccacctgcctccagggctggactgaggcctgaacacccgccacagagctggctgctccaataatgtctctatgagactcaagaacttttcattttttttccaggcaggttcaggtctggggtggattctgatttttgttccccctgcctcccccaatccctcccccaaccccccctttttttttactggtgtttgtctttaattcttcagccctcaacctcctggcctctcatttttgaatcaacattttttctttctgtccctttctccatctcttggtcactatcctccaactctaggaacaggtatggaggaaaagccctaggcttgagatttcatctgctctcctttctgaatctcagaggagggtaggagaagggggtggtatcttccctccccccagcactgaggaagaatggggctcttcccctttctcccttgcccccaggactgggccatttgtggggcagccagttctagcacagctcacactgagagtgtaagaactacaaacaaaatttctattaaattaagttttgtgtcttcaaaaaaaaaaaaaaaaaaaaaaaaaaaaaaaaaaaaaaaaaa

SEQ ID NO: 2 - protein, 416 aa, Rattus norvegicus
MLLSVPLLLGLLGLAAADPAIYFKEQFLDGDAWTNRWVESKHKSDFGKFVLSSGKFYGDQEKDKGLQTSQDARFYALSARFEPFSNKGQTLVVQFTVKHEQNIDCGGGYVKLFPGGLDQKDMHGDSEYNIMFGPDICGPGTKKVHVIFNYKGKNVLINKDIRCKDDEFTHLYTLIVRPDNTYEVKIDNSQVESGSLEDDWDFLPPKKIKDPDAAKPEDWDERAKIDDPTDSKPEDWDKPEHIPDPDAKKPEDWDEEMDGEWEPPVIQNPEYKGEWKPRQIDNPDYKGTWIHPEIDNPEYSPDANIYAYDSFAVLGLDLWQVKSGTIFDNFLITNDEAYAEEFGNETWGVTKAAEKQMKDKQDEEQRLKEEEEDKKRKEEEEAEDKEDEDDRDEDEDEEDEKEEDEEDATGQAKDEL

SEQ ID NO: 3 - DNA, 1816 bp, Rattus norvegicus
  CDS (16)..(1266)
ccccctcggcccgccatgctcctttcggtgccgctcctgcttggcctcctcggcctggctgccgcagaccctgccatctatttcaaagagcagttcttggacggagatgcctggaccaaccgctgggtcgaatccaaacataagtctgattttggcaaattcgtcctcagttctggcaaattctacggggaccaggagaaggataaagggttgcagacaagccaagatgcccgattttacgcgctgtccgccagattcgaacccttcagcaacaagggccagacactggtggtacagttcaccgtgaagcatgagcagaatatcgactgtgggggcggctacgtgaagctgtttccgggtggcttggaccagaaggacatgcatggagactcagaatataacatcatgtttggtccggacatctgcggtcctggcaccaagaaggttcatgtcatctttaactacaagggcaagaacgtgctgatcaacaaggatatccggtgtaaggatgatgaattcacacatctatacacgctgattgtgcggccagacaacacctacgaggtgaaaattgacaacagccaggtggagtcgggctccttggaggatgattgggactttctgccgcccaagaagattaaggatcctgacgctgccaagccagaagactgggatgaacgagccaagattgatgaccccacagattccaagcctgaggactgggacaagccagagcacatccctgaccctgatgctaagaagcctgaggactgggacgaagagatggatggagagtgggaaccaccagtgattcaaaatcctgaatacaagggcgaatggaagccacgtcaaattgacaacccagattacaagggtacctggatacacccagagattgacaatcctgaatactcccccgatgcgaatatctatgcctatgatagttttgctgtactgggcttagacctctggcaggtcaagtctggcacaatttttgacaacttcctcatcaccaatgatgaggcctatgcagaggagtttggcaatgagacctggggtgtcaccaaggctgcagagaagcagatgaaggacaagcaggatgaggagcagaggcttaaggaagaagaagaagacaagaagcgtaaagaggaagaggaggccgaggataaagaggatgaggatgacagagatgaagatgaagatgaagaggatgagaaggaagaagatgaggaggatgccactggccaagccaaggatgagctgtagaggccacaccacctgcctccagggctggactgaggcctgaacaccccgccacagagctggctgctcccaataatgtctctatgagactcaagaacttttcatttttttttcaggcaggttcaggtctggggtggattctgatttttgttcccctgcctccccatcctccccacccccctttttttttactggtgtttgtctttaattcttcagccctcacctcctggcctctcatttttgaatcaacattttttctttctgtccctttctccatctcttggtcactatcctccaactctaggaacaggtatggaggaaaagcctaggcttgagatttcatctgctctcctttctgaatctcagaggagggtaggagaagggggtggtatcttccctccccccagcactgaggaagaatggggctcttcccctttctcccttgcccccaggactgggccatttgtggggcagccagttctagcacagctcacactgagagtgtaagaactacaaacaaaatttctattaaattaagttttgtgtcttccca

SEQ ID NO: 4 - protein, 416 aa, Rattus norvegicus; identical to SEQ ID NO: 2

SEQ ID NO: 5 - DNA, 1539 bp, Rattus norvegicus
  CDS (14)..(1264)
ccctcggcccgccatgctcctttcggtgccgctcctgcttggcctcctcggcctggctgccgcagaccctgccatctatttcaaagagcagttcttggacggagatgcctggaccaaccgctgggtcgaatccaaacataagtctgattttggcaaattcgtcctcagttctggcaaattctacggggaccaggagaaggataaagggttgcagacaagccaagatgcccgattttacgcgctgtccgccagattcgaacccttcagcaacaagggccagacactggtggtacagttcaccgtgaagcatgagcagaatatcgactgtgggggcggctacgtgaagctgtttccgggtggcttggaccagaaggacatgcatggagactcagaatataacatcatgtttggtccggacatctgcggtcctggcaccaagaaggttcatgtcatctttaactacaagggcaagaacgtgctgatcaacaaggatatccggtgtaaggatgatgaatttacacatctatacacgctgattgtgcggccagacaacacctacgaggtgaaaattgacaacagccaggtggagtcgggctccttggaggatgattgggactttctgccgcccaagaagattaaggatcctgacgctgccaagccagaagactgggatgaacgagccaagattgatgaccccacagattccaagcctgaggactgggacaagccagagcacatccctgaccctgatgctaagaagcctgaggactgggacgaagagatggatggagagtgggaaccaccagtgattcaaaatcctgaatacaagggcgaatggaagccacgtcaaattgacaacccagattacaagggtacctggatacacccagagattgacaatcctgaatactcccccgatgcgaatatctatgcctatgatagttttgctgtactgggcttagacctctggcaggtcaagtctggcacaatttttgacaacttcctcatcaccaatgatgaggcctatgcagaggagtttggcaatgagacctggggtgtcaccaaggctgcagagaagcagatgaaggacaagcaggatgaggagcagaggcttaaggaagaagaagaagacaagaagcgtaaagaggaagaggaggccgaggataaagaggatgaggatgacagagatgaagatgaagatgaagaggatgagaaggaagaagatgaggaggatgccactggccaagccaaggatgagctgtagaggccacaccacctgcctccagggctggactgaggcctgaacacccgccacagagctggctgctccaataatgtctctatgagactcaagaacttttcattttttttcaggcaggttcaggtctggggtggattctgatttttgttcccctgcctccccatcctccccacccccccttttttttttactggtgtttgtctttaattcttcagccctcacctcctggcctctcatttttgaatcaacattttttctttctgtccctttaaaaaaaa

SEQ ID NO: 6 - protein, 416 aa, Rattus norvegicus; identical to SEQ ID NO: 2

SEQ ID NO: 7 - DNA, 1849 bp, Mus musculus
  CDS (41)..(1492)
actgcggtctctcttgggtcaccacctctccagcaacagcatgtcgctttcagtctgcacctcttccctgtccaggaggtcttcctcacagaatggggcggcaggcagaccttggggtgcatctgcttctagtgttgccggcggctatgggggatcggcctctggctttggagttggctgtggaggcctcttttctgctgcttccatgtttggttctagttctggctttagcggtggctctgcaggttgcttgccggggcttggctctgcctatgggggacctctgagaggtggcgcgggaggaattgggatagggattggggatagctggaatgcgggcgttggctctctgtgtatcttttctggcaatgatggaggtcttctttctggttctgagaaagaaaccatgcaaaatctaaatgacagactagcttcctacctgggtaaggttcgctctctagaggaggctaatgcagaactggaaaacaaaattcgagagtggtatgaaacacggagaaccagagacgctgggtctcagagtgattacagtaaatactacccactgattgaagacttgaagaataagatcgtttctgccagagtcagcaacgcccagctcctcctgcagattgacaacgcaaggctggctgctgaggacttcaggatgaagtatgagaatgagctggccctgcgccagaccgtggaggccgacatcaacgggctgcgaagggtgctggacgagctgaccctgactagagccgacctggaagcccagcttgagaccctcactgaggagctggcttacatgaagaagaaccacgaagaggaactccaaagtttccaggcaggtggtccaggtgaggtcaatgtagaaatggacgcggcccctggagtggatctcaccaaggtcctcaatgaaatgagagcccagtatgaagccatggctgagcaaaatcggaaagatgcagaggcctggttccttgaaaagagcggagagctccgaaaagagatcagcagcaacacggagcagcttcagtccagcaagagcgaggtcaccgacctgaagcgcatggtgcagaacctagagattgaactccagtcccagctcgccatgaagtcgtccctggaaggctcgctggctgaaaccgagggtgggtactgctgccaactgtctcaggtgcagcagctgatcggcagcctggaggagcaactccaacaggtgcgggctgacgcggagcgccagaatgcggaccaccagcggctgctgggcgtcaaggctcgcctggagatggagattgagacctaccgccggctgctggagggggacagccaaggtgacggttttgacgagagctcatccctttccgtctccaaaccgcagacaccatcagtcgattcctctaaagacccaaataaaactcgaaaaatcaagacagtcgtgcaggagatagtgaatggtgaagtggtctcatcccaggttccaggaacttgaagaagagatgtaaggcctcacacgggctcctctgggatgcgaagtttccagccaggagttaccgcttccgtgcgctatattgattcagcacctgtttgggccagtttccttttccttggattctctatgcaggttgggtcttgttagcatttctgaaacaatatccaatttacaagtctctgtggctctgctggtcttctattgaaccccagatcaccttacaccttcctgggcctgaagaagtctttccactaagtttttctggtcgcctggaccatttctttaatcccacagctttgatggaaccgtatggtttaacaacgctaactttaattaaagattaatggcaatgaagtg

SEQ ID NO: 8 - protein, 483 aa, Mus musculus
MSLSVCTSSLSRRSSSQNGAAGRPWGASASSVAGGYGGSASGFGVGCGGLFSAASMFGSSSGFSGGSAGCLPGLGSAYGGPLRGGAGGIGIGIGDSWNAGVGSLCIFSGNDGGLLSGSEKETMQNLNDRLASYLGKVRSLEEANAELENKIREWYETRRTRDAGSQSDYSKYYPLIEDLKNKIVSARVSNAQLLLQIDNARLAAEDFRMKYENELALRQTVEADINGLRRVLDELTLTRADLEAQLETLTEELAYMKKNHEEELQSFQAGGPGEVNVEMDAAPGVDLTKVLNEMRAQYEAMAEQNRKDAEAWFLEKSGELRKEISSNTEQLQSSKSEVTDLKRMVQNLEIELQSQLAMKSSLEGSLAETEGGYCCQLSQVQQLIGSLEEQLQQVRADAERQNADHQRLLGVKARLEMEIETYRRLLEGDSQGDGFDESSSLSVSKPQTPSVDSSKDPNKTRKIKTVVQEIVNGEVVSSQVPGT

SEQ ID NO: 9 - DNA, 6579 bp, Mus musculus
  CDS (83)..(628)
cctcccagcctataaaggcaggaccccttctggcataccagcactgcggtctctcttgggtcaccacctctccagcaacagcatgtcgctttcagtctgcacctcttccctgtccaggaggtcttcctcacagaatggggcggcaggcagaccttggggtgcatctgcttctagtgttgccggcggctatgggggatcggcctctggctttggagttggctgtggaggcctcttttctgctgcttccatgtttggttctagttctggctttagcggtggctctgcaggttgcttgccggggcttggctctgcctatgggggacctctgagaggtggcgcgggaggaattgggatagggattggggatagctggaatgcgggcgttggctctctgtgtatcttttctggcaatgatggaggtcttctttctggttctgagaaagaaaccatgcaaaatctaaatgacagactagcttcctacctgggtaaggttcgctctctagaggaggctaatgcagaactggaaaacaaaattcgagagtggtatgaaacacggagaaccagagacgctgggtctcagagtgattacagtaaatactacccactgattgaagacttgaagaataaggtaaggggaggggctttagaaaccttttcattttattacaaatatttttataaaaataaatcctcttaacttagatatttttaaatagatggtacttggagaatttcctcccctcaagaagcacagaagtacagttccgttcaccattaagtggccgtccttccactgtctaaaagaaatgttcttaacttatcaacattatttttaatcaatacatttgcttttaaaatgaagctgtcccgaacccttcagagtttggggctttgctttgttttgctgtggtgctgggaatgaacacagggcttcgggtatgtgaccaagtgcctcccattgagctacagccacatcctttgccttagaaaaccggaactggagactgagcgaggtaacccaagcccagataggcaaacgccatctactatcttcagatgtgattctagttgatgtttaggttctgttagattaactgagtgcctatagagagcagaaggtctcatggtcagggaggaggtgcttaaactgatatagaggtaagggggaagagtaacataggaaggtttaaacaaagatggggtggggatgcacaagaaaagtaagggtgaggagggaagcccaaccaaaactaaagatgatagaagagccatatttaaaaaaaaaaaaaaaaaaaaaaaaaaaaagctgaaagaatgtgacttaaagatgaagagtttggatggaggaaaaatgtattttgtgtcacgatttattcttatgtgcaaagtgacactagtgaactaactgccagtgctttaggactccgtgttcatgtgtctccctctgttctcccagatcgtttctgccagagtcagcaacgcccagctcctcctgcagattgacaacgcaaggctggctgctgaggacttcaggatgaagtgagtccgctggtggtaactccttcctcctccctccccccacttcctgctgtgctgatggcaaacgattccaatgtcctgcagcccacatggcccctgccttcagtgcacccctaaatccacacagggtgcttttaaaagcactgaaagtcaaaccgtccactgtacacagctttaagttataagttgcttccacctggagctacggatcaactctttgcaatgagtcataattcaacctgataattgtacctatgtttagacctgaattttcaatgtatcaaagtgaattaacaatatctttgccaaggggttcaatggaacaattgtgtccctgatgacacatatgactgaaagcttaaccatgcatttatttttatataccagatcctttcccataccccaccctcctatgcagagggaatacaaattaatttcctttttgtattataaaatgcccccacaggaagttgtaacctgagcctgtgaagacccagtaaaagctactaatgaaataacaaggtttaaagcaaccctcaaaggaaatcaggcagaaagagtagccatcggtttatctccagctagttttagaatatcatcagaaagtcaaactacagggagccttcttcctgggatgcaaggatcactgctggtaggaagttctcggttcatcatttcttcatctttcttctcttgtctccaaatgaggagtaagcaatcatactcacacacagaggaaaagtcacaaaataaaaaatcggcataatatactgttagcgcagtgttttcttctctccctcccctcttcctcctcttcttccttctcttcttcctccttctccttcttcttcctccccctcctcctcctcttccctagggctgccttgaactcactatatagtggaggatgaccttgaactcatggctctacttctcaagtactaggattacagacatgggccacatagcccagaagatgtccaggatccatcgcaatggttgtgttaatgttgacttcctaaactgtcggcacttgggttccaggtatgagaatgagctggccctgcgccagaccgtggaggccgacatcaacgggctgcgaagggtgctggacgagctgaccctgactagagccgacctggaagcccagcttgagaccctcactgaggagctggcttacatgaagaagaaccacgaagaggtcagaaatagctttattttttttcctcccagacccaaaaattgaaactttgaattaacaaatgctagagaatatattatctctgtgttacagtgactattcatttttggtgttcctctatgtgtgtcccccaaccccccaccccacctcaccctcttgtgcatgtgtcatggtattttttattaaggcttaatggattcgagtattagacttgggatagcggggaatatctggttttactatttccatcattaagtaatggcaggaattttaattaccttcgtcaaatgttttctttaaatacggagtgtttcaaaaatgaaaacaaaagtctacagctgacacatatccagccacatatgttagagaagtgtaaccaatataagacatatggagatctgatgtgtgtatcagaggccggggcatggacaggaagaacgaccactggcaatgggcttctaagaaactttctgttgggttctcaatgactatgtgtgaaatagtgtatgaccccagggtgccacttgtggcactagctctgtagcagttgctggagcaatctgcacaccaggtctctctttcctttctgtaaactataggaagtggatgttctagaagcagagccagcaaccacaggcacagaacgtggagcccctgatcactcaagaaacctgagaaaatatcttggtttttggttttagttttttttaattatgagagaaacaggttttcaagcttaaagaaaaatgtgtggatgccttgcgctaatattttgcctttataccaactcactcaaaaatatattttttattattatcatgcatgaagagacccaagaaggcaaacgtacctgggggactcactagccacatgtactcctgtgtctttctctctccattgctgtctctaggaactccaaagtttccaggcaggtggtccaggtgaggtcaatgtagaaatggacgcggcccctggagtggatctcaccaaggtcctcaatgaaatgagagcccagtatgaagccatggctgagcaaaatcggaaagatgcagaggcctggttccttgaaaaggtaacaccgcgagatttgatgcattcccagaaagccctttgagccagcgcagagctcaccccatccacctactttgctgttgcagagcggagagctccgaaaagagatcagcagcaacacggagcagcttcagtccagcaagagcgaggtcaccgacctgaagcgcatggtgcagaacctagagattgaactccagtcccagctcgccatggtagcgtgacatgcagagagagatgatgcatcctttaacttccaaaaaaaaagatgttgcacccaccgtatgctggaccatgggctgcccatcttgttctctgatccccagacaattctgtctatctcccatttgcagaagtcgtccctggaaggctcgctggctgaaaccgagggtgggtactgctgccaactgtctcaggtgcagcagctgatcggcagcctggaggagcaactccaacaggtgcgggctgacgcggagcgccagaatgcggaccaccagcggctgctgggcgtcaaggctcgcctggagatggagattgagacctaccgccggctgctggagggggacagccaagggtgagcagacaataagattggaaacatcgtaggggctgaaagactgtggacacctgatgcagattttttttctgcagtgggagaagagggctgtagtcgactaaacagggaacaaatcttgccagtgatcctagcactgaggagtctggggcaagaggaacccacgttccagaccaacctgagctacatctgcatactgcctgcaggaagagggggtgggctgggaagcttgcaagtgtaaagaactgagtccagagcccccaaaacccatgtcgagtgtatctctaacctcatcgctcctgctgaagacagaaggtggaggcatgaagagcctcagaagtctgtggccagtgtgtctaacaaggtgtagtccagaaccaacacatgaacatgcatgcacacacacacacacacacacacacacagacttttgaagaggagggaaaaaaggataaaacaacaaatctagaaaatgcatgcctttcagccactatctcacttgatacaaattaataaaatgctcattatgttctaggaaggaaccactctgatgctaggataacacatcaattagcagcatccggtcctccaggcccacgttgtccaaccgtcatcaacatagcgccctaatctggaggaagagcccagatggtaattaagacagctgatttctgagaccaagctgctccccctcagagcccatgtaggaggtttggatgaaaatctgtgctgacccaattagctaccctcgtggtgcatcagtcagccaagaaacttgtaatagcatctctatttttgttgtggttgtgtaggcgtctctcatgtttaagctcaagcagcagggtctccttacttatccaacaatcacgtagcacagctctccttctctttacagtgacggttttgacgagagctcatccctttccgtctccaaaccgcagacaccatcagtcgattcctctaaaggtatggacacgagaatcattaaaaataaggcagaatctcattcgtgaaatgactaaactgtaagatctcactaaacgttgagcgtaaataacttaaaatagatttgtgttctgagcaggggacatatcactgtctctgctcaaacacactgggcagtggagtggtatattaaaactctcagcaagctcaagtaagaaaatcctactctaggaagacaaaatgagtgccatgagacggggtttctctatgtagccctggctgttcaggaactcactctgtagaccaggctgcccttgaactcatggagatccacctgcctctgcctcctaaatgctaggattacattcatgcactaccatgcacacttcttaaatgctttaaagtacaccaggattagtgtgtgcctgccatcccatctcttggagggctaaatttttttaataaaaattaaaagagagagagagaaagagagagggggggggatagtgagttccaggctatcctgggctaatatttagcaagaccctgaactgaaagaaagaactagagaacagagagatggagggagacgtgagccttttgatttgtgcacaagacagtcctgaataaatttcatttccactgagtaaaactcacttggtttggaatggagtcacttgcaaaagtctgaatttgacgaaaagcttaagttgaacaagaataaaccttggcttgataactgcttagtaataatcatttccctcttttctgctttttgtttgtttgtttatttgtttgtttacctttagacccaaataaaactcgaaaaatcaagacagtcgtgcaggagatagtgaatggtgaagtggtctcatcccaggttccaggaacttgaagaagagatgtaaggcctcacacgggctcctctgggatgcgaagtttccagccaggagttaccgcttccgtgcgctatattgattcagcacctgtttgggccagtttccttttccttggattctctatgcaggttgggtcttgttagcatttctgaaacaatatccaatttacaagtctctgtggctctgctggtcttctattgaaccccagatcaccttacaccttcctgggcctgaagaagtctttccactaagtttttctggtcgcctggaccatttctttaatcccacagctttgatggaaccgtatggtttaacaacgctaactttaattaaagattaatggcaatgaagtg

SEQ ID NO: 10 - protein, 182 aa, Mus musculus
MSLSVCTSSLSRRSSSQNGAAGRPWGASASSVAGGYGGSASGFGVGCGGLFSAASMFGSSSGFSGGSAGCLPGLGSAYGGPLRGGAGGIGIGIGDSWNAGVGSLCIFSGNDGGLLSGSEKETMQNLNDRLASYLGKVRSLEEANAELENKIREWYETRRTRDAGSQSDYSKYYPLIEDLKNK

SEQ ID NO: 11 - DNA, 2088 bp, Rattus norvegicus
  CDS (1)..(1641)
gccaaagatgtaaaatttggtgcggatgctcgagccttaatgcttcaaggtgtagaccttttagccgatgctgtagctgttacaatggggccaaagggaagaacagtgattattgaacagagttggggaagtcccaaagtaacaaaagatggggtcactgttgcaaagtcaattgatttaaaggataaatacaaaaatatcggagctaagcttgttcaggatgttgccaataacacaaatgaagaggctggggatggcaccaccactgccactgttctggcacggtctattgccaaggagggctttgagaagatcagcaaaggggctaatccagtggaaatccggagaggtgtgatgttggctgttgatgctgtaattgctgaacttaagaaacaatctaaacctgtgacaacccctgaagaaattgctcaggttgctacaatttctgcaaacggagacaaagacattgggaacatcatttctgatgcaatgaagaaggttggaagaaagggtgtcatcacagtgaaggatggaaaaaccctgaatgatgagctagaaattattgaaggcatgaagtttgatagaggatatatttccccatattttattaacacatcaaaaggtcaaaaatgtgaattccaagatgcctatgttttgttgagtgaaaagaaaatttctagtgttcagtccattgtacctgctcttgaaattgccaatgctcaccggaagcccttggtcataattgctgaagatgttgatggagaagctcttagcacactggttttgaacaggctaaaagttggtcttcaggttgtagcagtcaaagctccagggtttggggacaacaggaagaaccagcttaaagatatggctatcgctactggtggtgcggtgtttggagaagagggtttgaatctaaatcttgaagatgttcaagctcatgatttagggaaagttggagaggtcatcgtcaccaaagatgatgccatgcttttgaaaggaaaaggtgacaaagctcacattgaaaaacgtattcaagaaatcactgagcagctagacatcacaactagtgaatatgagaaggaaaagctgaacgagcgacttgctaaactctcagatggagtagctgtgttgaaggttggagggacaagtgatgttgaagtgaatgagaagaaagacagagttacagatgctctcaatgctacaagagcagctgttgaagaaggcattgttctaggagggggctgtgctctacttcggtgcatcccagccttggattcattaaagcctgctaatgaagatcagaagataggtatagaaattattaaaagagcacttaaaattcctgcaatgacaattgctaagaatgcaggtgttgaaggatctttgatagttgaaaaaattctgcagagttcctcagaggttggctatgatgccatgcttggagattttgtgaacatggtggaaaagggaatcattgatccaacaaaggttgtaagaactgctttactggatgctgctggggtggcctccctgctaactacagccgaagctgtagtgacagaaattcctaaagaagagaaggaccctggaatgggtgcaatgggtggaatgggagggggtatgggaggtggcatgttctaactcctagaatagtgctttgcccttatcaatgaactgtggcaggaagctcaaggcaggttcctcaccaataacttcagagaagtcacctgaagaaaatgactgaagagaaggctggctgatcactgtaaccatcagttactggtttcctttgacaatacataatggtttactgctgtcattgtccatgcctacagataatttattttgtatttttgaataaagacatttgtacattcctgatgctgggtgcaagagccagtgtcctgctttcaacttaaatcactgaggcatctctactgttctgttagcatcaggactgtagcgctgtgtcaccacatgagaagttcagaagcagcctttctgtggagggtgagaatgattgtgtacagagtagagaagtatccaattatgtgacaacctttgtgtaataaaattttgtttaaa

SEQ ID NO: 12 - protein, 547 aa, Rattus norvegicus
AKDVKFGADARALMLQGVDLLADAVAVTMGPKGRTVIIEQSWGSPKVTKDGVTVAKSIDLKDKYKNIGAKLVQDVANNTNEEAGDGTTTATVLARSIAKEGFEKISKGANPVEIRRGVMLAVDAVIAELKKQSKPVTTPEEIAQVATISANGDKDIGNIISDAMKKVGRKGVITVKDGKTLNDELEIIEGMKFDRGYISPYFINTSKGQKCEFQDAYVLLSEKKISSVQSIVPALEIANAHRKPLVIIAEDVDGEALSTLVLNRLKVGLQVVAVKAPGFGDNRKNQLKDMAIATGGAVFGEEGLNLNLEDVQAHDLGKVGEVIVTKDDAMLLKGKGDKAHIEKRIQEITEQLDITTSEYEKEKLNERLAKLSDGVAVLKVGGTSDVEVNEKKDRVTDALNATRAAVEEGIVLGGGCALLRCIPALDSLKPANEDQKIGIEIIKRALKIPAMTIAKNAGVEGSLIVEKILQSSSEVGYDAMLGDFVNMVEKGIIDPTKVVRTALLDAAGVASLLTTAEAVVTEIPKEEKDPGMGAMGGMGGGMGGGMF

SEQ ID NO: 13 - DNA, 2175 bp, Rattus norvegicus
  CDS (7)..(1728)
gcagaaatgcttcgactacccacagtccttcgccagatgagaccagtgtctcgggcactggctcctcatctcactcgggcctatgccaaagatgtaaaatttggtgcggatgctcgagccttaatgcttcaaggtgtagaccttttagccgatgctgtagctgttacaatggggccaaagggaagaacagtgattattgaacagagttggggaagtcccaaagtaacaaaagatggggtcactgttgcaaagtcaattgatttaaaggataaatacaaaaatatcggagctaagcttgttcaggatgttgccaataacacaaatgaagaggctggggatggcaccaccactgccactgttctggcacggtctattgccaaggagggctttgagaagatcagcaaaggggctaatccagtggaaatccggagaggtgtgatgttggctgttgatgctgtaattgctgaacttaagaaacaatctaaacctgtgacaacccctgaagaaattgctcaggttgctacaatttctgcaaacggagacaaagacattgggaacatcatttctgatgcaatgaagaaggttggaagaaagggtgtcatcacagtgaaggatggaaaaaccctgaatgatgagctagaaattattgaaggcatgaagtttgatagaggatatatttccccatattttattaacacatcaaaaggtcaaaaatgtgaattccaagatgcctatgttttgttgagtgaaaagaaaatttctagtgttcagtccattgtacctgctcttgaaattgccaatgctcaccggaagcccttggtcataattgctgaagatgttgatggagaagctcttagcacactggttttgaacaggctaaaagttggtcttcaggttgtagcagtcaaagctccagggtttggggacaacaggaagaaccagcttaaagatatggctatcgctactggtggtgcggtgtttggagaagagggtttgaatctaaatcttgaagatgttcaagctcatgatttagggaaagttggagaggtcatcgtcaccaaagatgatgccatgcttttgaaaggaaaaggtgacaaagctcacattgaaaaacgtattcaagaaatcactgagcagctagacatcaccactagtgaatatgagaaggaaaagctgaacgagcgacttgctaaactctcagatggagtagccgtgttgaaggttggagggacaagtgatgttgaagtgaatgagaagaaagacagagttacagatgctctcaatgctacaagagcagctgttgaagaaggcattgttctaggagggggctgtgctctacttcggtgcatcccagccttggattcattaaagcctgctaatgaagatcagaagataggtatagaaattattaaaagagcacttaaaattcctgcaatgacgattgctaagaatgcaggtgttgaaggatctttgatagttgaaaaaattctgcagagttcctcagaggttggctatgatgccatgcttggagattttgtgaacatggtggaaaagggaatcattgatccaacaaaggttgtaagaactgctttactggatgctgctggggtggcccccctgctaactacagccgaagctgtagtgacagaaattcctaaagaagagaaggaccctggaatgggtgcaatgggtggaatgggagggggtatgggaggtggcatgttctaactcctagaatagtgctttgcccttatcaatgaactgtggcaggaagctcaaggcaggttcctcaccaataacttcagagaagtcacctgaagaaaatgactgaagagaaggctggctgatcactgtaaccatcagttactggtttcctttgacaatacataatggtttactgctgtcattgtccatgcctacagataatttattttgtatttttgaataaagacatttgtacattcctgatgctgggtgcaagagccagtgtcctgctttcaacttaaatcactgaggcatctctactgttctgttagcatcaggactgtagcgctgtgtcaccacatgagaagttcagaagcagcctttctgtggagggtgagaatgattgtgtacagagtagagaagtatccaattatgtgacaacctttgtgtaataaaattttgtttaaagtt

SEQ ID NO: 14 - protein, 573 aa, Rattus norvegicus
MLRLPTVLRQMRPVSRALAPHLTRAYAKDVKFGADARALMLQGVDLLADAVAVTMGPKGRTVIIEQSWGSPKVTKDGVTVAKSIDLKDKYKNIGAKLVQDVANNTNEEAGDGTTTATVLARSIAKEGFEKISKGANPVEIRRGVMLAVDAVIAELKKQSKPVTTPEEIAQVATISANGDKDIGNIISDAMKKVGRKGVITVKDGKTLNDELEIIEGMKFDRGYISPYFINTSKGQKCEFQDAYVLLSEKKISSVQSIVPALEIANAHRKPLVIIAEDVDGEALSTLVLNRLKVGLQVVAVKAPGFGDNRKNQLKDMAIATGGAVFGEEGLNLNLEDVQAHDLGKVGEVIVTKDDAMLLKGKGDKAHIEKRIQEITEQLDITTSEYEKEKLNERLAKLSDGVAVLKVGGTSDVEVNEKKDRVTDALNATRAAVEEGIVLGGGCALLRCIPALDSLKPANEDQKIGIEIIKRALKIPAMTIAKNAGVEGSLIVEKILQSSSEVGYDAMLGDFVNMVEKGIIDPTKVVRTALLDAAGVAPLLTTAEAVVTEIPKEEKDPGMGAMGGMGGGMGGGMF

SEQ ID NO: 15 - DNA, 1725 bp, Rattus norvegicus
  CDS (174)..(1535)
gaattcctgctgcacccatatttgaatattgttttatcctcatcacgcgaacttcctggggaaggactccaaggtccaagtgggcgggaaggagggtccttaaatgtgccctctttcagctcttgctcattccaggagtcccagctgctggagaaggctgtgtaggagttgcaatgagcagtatcagtgacaccgtgaaacgggccagggaggcctttaactccggcaagactcgatcgctgcagttccgaatccagcagttggaggcgctgcagcgcatgatcaatgagaacctgaaaagcatctctggggcgctggcctctgacctgggcaagaacgaatggacctcctactatgaggaagtggctcacgtactggaggagcttgataccacaattaaggagctccctgattgggctgaggatgagcctgtggccaagactcgccagacccagcaggatgacctctacatccactcggagcccctgggtgtggtccttgtcataggtgcttggaactaccccttcaacctcaccatccagcccatggtgggtgccgttgctgcaggaaacgcagtgatcctcaagccctcagaagtgagcgggcacatggcagacctgctagcgacactcatccctcagtatatggaccagaatctgtacctagtggtcaaagggggtgtccctgaaaccacggagctgctcaaagagaggtttgaccacatcatgtacactgggagcacagccgtagggaagattgttatggccgctgccgccaagcatctgactcctgtcaccctggagcttggagggaaaagcccttgttacgtggacaaggactgtgatctagatgtggcttgcaggcgtatcgcctgggggaaatttatgaacagtggccagacctgtgtggccccagactacatcctctgtgacccctcgattcagaaccaaatcgtggagaagctcaagaagtcactcaaagatttctatggggaagatgctaagcagtcccgtgattatgggaggatcatcaatgaccgtcacttccagcgggtcaaaggcctgattgacaaccagaaagtagcccatggaggcacttgggaccagtcctcacgatacatagctccaaccatcctggtggatgtggacccccagtccccagtgatgcaggaggagatctttgggccggtgatgcccattgtgtgtgttcgaagcttggaggaggccattcaatttatcaaccagcgtgagaagcccctggcactctatgtgttctccaacaatgagaaggtgatcaagaaaatgatcgcagagacatccagcggtggagtgacagccaatgacgtcattgttcacatcaccgtgcccactttgccctttggtggtgtggggaacagcggcatgggggcctaccatggcaagaaaagcttcgagaccttctcccaccgccgctcttgcctggtgaagtctctgttgaatgaagaagctcacaaggccaggtatcccccaagcccagccaagatgccccggcactgagagagtgctgctgcacctgacacatgttttgctggctgtcttgtccttgaggagttgctcatggagcctcatcctggcttattcccacctgccgtcctgtgcttaactccccgaaggactctcacctcactcctccaaattccactgtttgctgggcacagaaatcaataaaagcctctgaggaaaagtc

SEQ ID NO: 16 - protein, 453 aa, Rattus norvegicus
MSSISDTVKRAREAFNSGKTRSLQFRIQQLEALQRMINENLKSISGALASDLGKNEWTSYYEEVAHVLEELDTTIKELPDWAEDEPVAKTRQTQQDDLYIHSEPLGVVLVIGAWNYPFNLTIQPMVGAVAAGNAVILKPSEVSGHMADLLATLIPQYMDQNLYLVVKGGVPETTELLKERFDHIMYTGSTAVGKIVMAAAAKHLTPVTLELGGKSPCYVDKDCDLDVACRRIAWGKFMNSGQTCVAPDYILCDPSIQNQIVEKLKKSLKDFYGEDAKQSRDYGRIINDRHFQRVKGLIDNQKVAHGGTWDQSSRYIAPTILVDVDPQSPVMQEEIFGPVMPIVCVRSLEEAIQFINQREKPLALYVFSNNEKVIKKMIAETSSGGVTANDVIVHITVPTLPFGGVGNSGMGAYHGKKSFETFSHRRSCLVKSLLNEEAHKARYPPSPAKMPRH

SEQ ID NO: 17 - DNA, 2024 bp, Rattus norvegicus
  CDS (46)..(1551)
caatttgctgagcctgtcacctttgttccaggagccaaaccagcaatgtcttcccctgcacagcctgcagttcctgccccactggccaacttgaagattcaacacaccaagatctttataaacaatgaatggcacaactcattgaatggcaagaaatttcctgtcattaaccctgcaactgaagaggtcatctgccatgtggaagaaggggacaaggcagatgttgacaaagctgtgaaggctgcaagacaggctttccagattggctccccctggcgcaccatggatgcttcagagagaggatgcctgctgaacaagctggctgacttaatggagagagatcgcgtgctgctggctacaatggaatcaatgaatgctggaaaaatctttactcatgcataccttttggatacagaggtcagcataaaagccttaaagtactttgcaggctgggcagacaagattcatggccaaacaattccaagtgatggagatgttttcacttatacaagacgtgaacctattggggtgtgtggccaaatcattccttggaatggtccgttgattttattcatttggaagataggcgctgcccttagctgtgggaacactgtgattgtgaagccagcagagcaaactcctctcacagctctttacatggcatctttaataaaagaggcagggtttcctcctggtgtggtgaacgttgtccctggttatggatcaactgcaggggcagccatctcttctcacatggacatagacaaggtgtctttcacaggatcaacagaggttggcaaattaatcaaagaagctgcagggaaaagcaatctgaagagggtcaccctggagcttgggggaaagagcccttgcattgtgtttgcagatgctgacttggatagtgctgttgagtttgcacaccaaggagtattcttccaccagggtcagatttgtgtcgcagcatccagactttttgttgaggagtccatttacgatgaatttgttaggaggagtgtggagcgggctaagaaatacgttctaggaaatcctctggactcaggaataagtcaaggtcctcagattgacaaggagcaacatgctaaaatccttgatctcattgagagtgggaagaaagaaggcgccaaactggagtgtggtggaggacgctgggggaacaaaggcttctttgtccagcctacagtcttctccaatgtgaccgatgagatgcgcattgccaaagaggagatatttggaccagtgcaacaaatcatgaagtttaagtccatagatgaggtgatcaagagagccaacaatactccctatggtctagcagcaggagtcttcacaaaagacctggacagggccatcactgtgtcttctgctctgcaggccgggacagtgtgggtgaattgttatttgactctctctgtccagtgcccatttggtgggttcaagatgtctggaaatgggcgagaaatgggtgaacagggtgtttatgaatacactgagctcaagacagtcgcaatgaaaatatctcagaagaactcctaaagaagccagcagagtgacgagaaactctcagcagtagctacatgtctcctacaatcaccagcagagggttgttttattacagggtcttctgttgatttcttaaacataaggaatccatcagcattactgtaactcatagaaaatgtatagtttaattcttctaatacatgaccctaatacatacccaagaagaaagggatacatttaggtacatgctctttgtaacccagtcatgaaaaagtgcttttcattgtagctacttgtctacagccctcatttgatgtgatttaaactctgtttctcggtgacttcttgccactactcaccatgcacaactgaaaagtcagccactgttcttggagttattgttctgagtattgtgaaatatttttagaatgacatacctgcttgtcaaatgaaatgcttagctgtaattagagtgcaaagtttaataaaggcaaaatctcacatga

SEQ ID NO: 18 - protein, 501 aa, Rattus norvegicus
MSSPAQPAVPAPLANLKIQHTKIFINNEWHNSLNGKKFPVINPATEEVICHVEEGDKADVDKAVKAARQAFQIGSPWRTMDASERGCLLNKLADLMERDRVLLATMESMNAGKIFTHAYLLDTEVSIKALKYFAGWADKIHGQTIPSDGDVFTYTRREPIGVCGQIIPWNGPLILFIWKIGAALSCGNTVIVKPAEQTPLTALYMASLIKEAGFPPGVVNVVPGYGSTAGAAISSHMDIDKVSFTGSTEVGKLIKEAAGKSNLKRVTLELGGKSPCIVFADADLDSAVEFAHQGVFFHQGQICVAASRLFVEESIYDEFVRRSVERAKKYVLGNPLDSGISQGPQIDKEQHAKILDLIESGKKEGAKLECGGGRWGNKGFFVQPTVFSNVTDEMRIAKEEIFGPVQQIMKFKSIDEVIKRANNTPYGLAAGVFTKDLDRAITVSSALQAGTVWVNCYLTLSVQCPFGGFKMSGNGREMGEQGVYEYTELKTVAMKISQKNS

SEQ ID NO: 19 - DNA, 312 bp, Mus musculus
  CDS (22)..(291)
agcctccctttccccctcaactgtcagcttgttagagttgggactgctgattatggaggtgcctcggagcagagcgatcagcagctggactgcgccttggacctgatgaggcgcctgcctccacagcagattgagaagaacctcagcgatctgatcgacctggtccccagtctgtgtgaagatctcctgtcatctgttgaccagcccctgaaaattgccagagacaaggtggtgggcaaggattaccttttgtgtgactacaacagagacggggactcctataggtcaccgtggagtaacaagtatgaccct

SEQ ID NO: 20 - protein, 90 aa, Mus musculus
CQLVRVGTADYGGASEQSDQQLDCALDLMRRLPPQQIEKNLSDLIDLVPSLCEDLLSSVDQPLKIARDKVVGKDYLLCDYNRDGDSYRSP

SEQ ID NO: 21 - DNA, 1014 bp, Mus musculus
  CDS (19)..(837)
gtcgccgccgccgccaccatgagcgatcagcagctggactgcgccttggacctgatgaggcgcctgcctccacagcagattgagaagaacctcagcgatctgatcgacctggtccccagtctgtgtgaagatctcctgtcatctgttgaccagcccctgaaaattgccagagacaaggtggtgggcaaggattaccttttgtgtgactacaacagagacggggactcctataggtcaccgtggagtaacaagtatgaccctcctttggaagatggggccatgccatctgctcggctcagaaagctggaggtagaggccaacaatgccttcgaccaataccgagacctgtattttgaaggtggggtctcatcagtctacctctgggatcttgatcatggctttgctggagtgatcctcataaagaaagctggagatggatccaagaagatcaaaggctgctgggattccatccacgtggtggaagtgcaggagaagtccagcggccgtactgcccattacaagttgacctccacggtgatgctatggctgcaaaccaacaaatccggctcgggcaccatgaacctgggaggcagcctaaccagacagatggagaaagacgaaactgtgagtgactgttccccacacatagccaacatcgggcgcctggtggaggacatggaaaacaaaatccgaagcacgctgaatgagatctactttggaaaaacaaaggacatcgtcaacgggctgaggtctgtgcagacgtttgcagacaaatcaaagcaagaagcgcttaagaacgacctggtggaggccttgaagagaaagcagcagtgttgaagacctctgcttcacgctaaccggacacgccatgcactcgttaggttcctttctttagaaaactcgttttctgctccttttccctcttcctttcccgccctgacaggtcacataacagtttgcatcgaccacgcagcgccatctctcccccaaaataaagtccgataaccaccctca

SEQ ID NO: 22 - protein, 272 aa, Mus musculus
MSDQQLDCALDLMRRLPPQQIEKNLSDLIDLVPSLCEDLLSSVDQPLKIARDKVVGKDYLLCDYNRDGDSYRSPWSNKYDPPLEDGAMPSARLRKLEVEANNAFDQYRDLYFEGGVSSVYLWDLDHGFAGVILIKKAGDGSKKIKGCWDSIHVVEVQEKSSGRTAHYKLTSTVMLWLQTNKSGSGTMNLGGSLTRQMEKDETVSDCSPHIANIGRLVEDMENKIRSTLNEIYFGKTKDIVNGLRSVQTFADKSKQEALKNDLVEALKRKQQC

SEQ ID NO: 23 - DNA, 1647 bp, Mus musculus
  CDS (48)..(881)
ggagagccacagacgccgggacagggaccgtcgccgccgccgccaccatgagcgatcagcagctggactgcgccttggacctgatgaggcgcctgcctccacagcagattgagaagaacctcagcgatctgatcgacctggtccccagtctgtgtgaagatctcctgtcatctgttgaccagcccctgaaaattgccagagacaaggtggtgggcaaggattaccttttgtgtgactacaacagagacggggactcctataggtcaccgtggagtaacaagtatgaccctcctttggaagatggggccatgccatctgctcggctcagaaagctggaggtagaggccaacaatgccttcgaccaataccgagacctgtattttgaaggtggggtctcatcagtctacctctgggatcttgatcatggctttgctggagtgatcctcataaagaaagctggagatggatccaagaagatcaaaggctgctgggattccatccacgtggtggaagtgcaggagaagtccagcggccgtactgcccattacaagttgacctccacggtgatgctatggctgcaaaccaacaaatccggctcgggcaccatgaacctgggaggcagcctaaccagacagatggagaaagacgaaactgtgagtgactgttccccacacatagccaacatcgggcgcctggtggaggacatggaaaacaaaatccgaagcacgctgaatgagatctactttggaaaaacaaaggacatcgtcaacgggctgagatctcttgatgctatccccgacaaccacaagtttaagcagttgcagagggaactttctcaagtgctgacccagcgccaggtctacatccagcctgataattgagccgacccaggtctgtgcagacgtttgcagacaaatcaaagcaagaagcgcttaagaacgacctggtggaggccttgaagagaaagcagcagtgttgaagacctctgcttcacgctaaccggacacgccatgcactcgttaggttcctttctttagaaaactcgttttctgctccttttccctcttcctttcccgccctgacaggtcacataacagtttgcatcgaccacgcagcgccatctctcccccaaaataaagtccgataaccaccctcctctggctccaaggcctgcttcccacgacgtttccatagagaccgtgtggttttgttcgcctgtcccccttccttcccttgcccatttataggcacagatacactgtctgacaccgctccctccatctttttgttacattggtgtaaaaaatgtaaaacaaaaaattttatgaactaactggtgtgtgagagaagaaactggagatctgatccgtgtgtgtgtgggagttgcttggagtcagggctggggacaggggacagcagtggaggaaggagtgatgtcctcagcactgtcctgcacaggtggacccttgtcccaaggagaccatgctggggtggggtggggctggcgaccggctgctcttcaggccaggtgcttttctgtcaatttttatggaatgcaaaaggagttttttgttttattttggtttttttttgtaaagcttaaacagacaaaaaaatctacatcttctacttgagcctccatactta

SEQ ID NO: 24 - protein, 277 aa, Mus musculus
MSDQQLDCALDLMRRLPPQQIEKNLSDLIDLVPSLCEDLLSSVDQPLKIARDKVVGKDYLLCDYNRDGDSYRSPWSNKYDPPLEDGAMPSARLRKLEVEANNAFDQYRDLYFEGGVSSVYLWDLDHGFAGVILIKKAGDGSKKIKGCWDSIHVVEVQEKSSGRTAHYKLTSTVMLWLQTNKSGSGTMNLGGSLTRQMEKDETVSDCSPHIANIGRLVEDMENKIRSTLNEIYFGKTKDIVNGLRSLDAIPDNHKFKQLQRELSQVLTQRQVYIQPDN

SEQ ID NO: 25 - DNA, 2048 bp, Rattus norvegicus
  CDS (58)..(1182)
ccgtgcgtcagtcagaacacgttcctgtttgcagaccacaaacccaggaaagccaggatggacactgctggaaaagttattaagtgcaaagcagctgtcctatgggggacgaaccagcccttctccattgaggacattgaagtggccccaccaaaggctaaggaagttcgtgttaagattttggccacgggaatctgtggcacagatgaccacgtgatcaagggaacgatggtgtctaagttcccagtgattgtgggacacgaagcagttgggattgtggagagtgttggagaagaggtcactacagtgagaccaggtgacaaagtgatccccctctttctaccacagtgtagagaatgcaacccctgccgcaacccggaggaaaatctctgcattaggagcgacctgacaggccgtggagtattggctgacggcacgaccaggttcacatgcaagggcaaaccagtccagcactttatgaacaccagcaccttcactgagtacacggtcctggatgaatcctccgtagctaagattgatgccgaggctcctcccgagaaagcctgcttgattggctgtggattttccactggttatggggctgctgttaaaactgccaaggtcagccctggctccacctgtgctgtgtttggcctgggaggagttggcctgtcagtcgtcatgggctgtaaagcggccggcgcctcccggatcatcggaattgacatcaacaaggacaaatttcagaaagccctggatgtaggggccacagagtgtatcaatcccagggacttcaccaagcccatcagtgaggtgctgtcagacatgacaggcaacactgtccagtatacttttgaagttatcgggcgccttgagaccatggttgatgccctctcatcttgccatatgaactatgggaccagcgtggtggtcggggctcctccgtcagccaagatgctcagctatgacccaatgctgcttttcactggacggacatggaagggctgcgtctttggtggttggaagagcagagatgatgttcccaaattggtgactgaattcctggaaaagaaatttgacctgggccagttgataacccacaccttgccttttcataacatcagtgaaggatttgaattgctttattcagggcaaagcattcggactgtcctgacattttgagatccagagagctgggtgttctgtgctgggcgaccgtgacctgaagccttgttcctgacagtgttctctgatatcacgagtctgtctcagaaatgccatgcagaggccaggttggggacaagagagagaagctctacagaggtttataaaccttcatatgtttagtttaccgggtgcctagcattagcagagaacagtaagagtaaatgttctagtctgcgttttcctaagacgataattctacacttcataagcatatacttggggttccaatttgttggaagagggactgttttccagaattttaccacaagttgttgttacttaaaaacagacaaagcatgtcgagagatgtagagaatacatttttcaagagatccccaccaaagccacccgagctctcattctgtttttcaacagaaacacttttaaaaatgttataaattaacttgaattagattgtgaaattgcacacataacttgattagattaagaaagaaagttgggaaatttaagggaagggcacgttttttaatgattaactttgaaaattatcgttatgtaatttagtgacatgggggaagcacatctgtgcctggggatatcgtcagcgtttattaatataaagcacttttacagtagcgattacagatgaaccatagatataaccacattgggatatttatgatattaaggttaataaagtagaatgacaagtccttaagggcatagtagtaactccatttaacatgaagattattctcagattgctttaactacaccagcctgtatctgcatctgtctgtggacatgtacacacacgtaatattcattaaattttcattgtggtaaaagaaaaaaaaaaa

SEQ ID NO: 26 - protein, 374 aa, Rattus norvegicus
MDTAGKVIKCKAAVLWGTNQPFSIEDIEVAPPKAKEVRVKILATGICGTDDHVIKGTMVSKFPVIVGHEAVGIVESVGEEVTTVRPGDKVIPLFLPQCRECNPCRNPEENLCIRSDLTGRGVLADGTTRFTCKGKPVQHFMNTSTFTEYTVLDESSVAKIDAEAPPEKACLIGCGFSTGYGAAVKTAKVSPGSTCAVFGLGGVGLSVVMGCKAAGASRIIGIDINKDKFQKALDVGATECINPRDFTKPISEVLSDMTGNTVQYTFEVIGRLETMVDALSSCHMNYGTSVVVGAPPSAKMLSYDPMLLFTGRTWKGCVFGGWKSRDDVPKLVTEFLEKKFDLGQLITHTLPFHNISEGFELLYSGQSIRTVLTF

SEQ ID NO: 27 - DNA, 2455 bp, Rattus norvegicus
  CDS (178)..(2103)
agagaagcagagaagcagagcaagcggcgcgttcccgaacctcgggcaagaccagcctctcccagagcatccccaccgcgaacgcacccttctccagagcataccccagcggaggccacccttccccagagcatccccgccgccaagcgcaaccttccagaagcagaccgcagcgacatggccaagaaaacagcgatcggcatcgacctgggcaccacctactcgtgcgtgggcgtgttccagcacggcaaggtggagatcatcgccaacgaccagggcaaccgcacgacccccagctacgtggccttcaccgacaccgagcggctcatcggggacgccgccaagaaccaggtggcgctgaacccgcagaacaccgtgttcgacgcgaagcggctgatcggccgcaagttcggcgacccggtggtgcagtcggacatgaagcactggcccttccaggtggtgaacgacggcgacaagcccaaggtgcaggtgaactacaagggcgagaaccggtcgttctacccggaggagatctcgtccatggtgctgaccaagatgaaggagatcgccgaggcgtacctgggccacccggtgaccaacgcggtgatcaccgtgcccgcctacttcaacgactcgcagcggcaggccaccaaggacgcgggcgtgatcgcgggtctgaacgtgctgcggatcatcaacgagcccacggcggccgccatcgcctatgggctggaccggaccggcaagggcgagcgcaacgtgctcatcttcgacctggggggcggcacgttcgacgtgtccatcctgacgatcgacgacggcatcttcgaggtgaaggccacggcgggcgacaccgacctgggcggggaggacttcgacaaccggctggtgagccacttcgtggaggagttcaagaggaagcacaagaaggacatcagccagaacaagcgcgcggtgcggcgcctgcgcacggcgtgcgagagggccaagaggacgctgtcgtccagcacccaggccagcctggagatcgactctctgttcgagggcatcgacttctacacgtccatcacgcgggcgcggttcgaggagctgtgctcggacctgttccgcggcacgctggagcccgtggagaaggccctgcgcgacgccaagctggacaaggcgcagatccacgacctggtgctggtgggcggctcgacgcgcatccccaaggtgcagaagctgctgcaggacttcttcaacgggcgcgacctgaacaagagcatcaatccggacgaggcggtggcctacggggcggcggtgcaggcggccatcctgatgggggacaagtcggagaacgtgcaggacctgctgctgctggacgtggcgccgctgtcgctgggtctggagaccgcgggcggcgtgatgacggcgctcatcaagcgcaactccaccatccccaccaagcagacgcagaccttcaccacctactcggacaaccagcccggggtgctgatccaggtgtacgagggcgagagggccatgacgcgcgacaacaacctgctggggcgcttcgagttgagcggcatcccgccggctcccaggggcgtgccccagatcgaggtgaccttcgacatcgacgccaacggcatcctgaacgtcacggccacggacaagagcaccggcaaggccaacaagatcaccatcaccaacgacaagggccgcctgagcaaggaggagatcgagcgcatggtgcaggaggccgagcgctacaaggcggaggacgaggtgcagcgcgagagggtggctgccaagaatgcgctcgagtcctacgccttcaatatgaagagcgccgtggaggacgagggtctcaagggcaagatcagcgaggctgacaagaagaaggtgctggacaagtgccaggaggtcatctcctggctggactctaacacgctggctgagaaagaggagttcgtgcacaagcgggaggagctggagcgggtgtgcaacccgatcatcagcgggctgtatcagggtgcgggtgctcccggggctgggggcttcggggcccaggcgcccaagggaggctctgggtcggggcccaccatcgaggaggtggattagaggcttttctggctctcagggtgttggctagagacagactcttgatggctgctggtgcacgattcttatcaagttactccttctctccggagttcagtttaaagttacagccttttatacggtaattgatttgagtttgttacattttgtatgctcgtgggttttttatatattcaaattaaggttgcatgttctttgcgtttaatctaagtagctgtgtaaaaatggtgtttccttcctgcgaacacctcagcactgccaccctgtgtacagttttttccttgcatccctacaaactgagaaaaaaagttatcttttgtaacttaaacattcaaaataaaatgttacaagt

SEQ ID NO: 28 - protein, 641 aa, Rattus norvegicus
MAKKTAIGIDLGTTYSCVGVFQHGKVEIIANDQGNRTTPSYVAFTDTERLIGDAAKNQVALNPQNTVFDAKRLIGRKFGDPVVQSDMKHWPFQVVNDGDKPKVQVNYKGENRSFYPEEISSMVLTKMKEIAEAYLGHPVTNAVITVPAYFNDSQRQATKDAGVIAGLNVLRIINEPTAAAIAYGLDRTGKGERNVLIFDLGGGTFDVSILTIDDGIFEVKATAGDTDLGGEDFDNRLVSHFVEEFKRKHKKDISQNKRAVRRLRTACERAKRTLSSSTQASLEIDSLFEGIDFYTSITRARFEELCSDLFRGTLEPVEKALRDAKLDKAQIHDLVLVGGSTRIPKVQKLLQDFFNGRDLNKSINPDEAVAYGAAVQAAILMGDKSENVQDLLLLDVAPLSLGLETAGGVMTALIKRNSTIPTKQTQTFTTYSDNQPGVLIQVYEGERAMTRDNNLLGRFELSGIPPAPRGVPQIEVTFDIDANGILNVTATDKSTGKANKITITNDKGRLSKEEIERMVQEAERYKAEDEVQRERVAAKNALESYAFNMKSAVEDEGLKGKISEADKKKVLDKCQEVISWLDSNTLAEKEEFVHKREELERVCNPIISGLYQGAGAPGAGGFGAQAPKGGSGSGPTIEEVD

SEQ ID NO: 29 - DNA, 707 bp, Rattus norvegicus
  CDS (1)..(39)
gctctgggtcggggcccaccatcgaggaggtggattagaggctctttctggcgctccaggtgtgatctaggagacagatgggtggccttgaggactttgggttattgtcgtttaggacattaactccttcgttcggtctgcaatcaagtcctaggtttaagcaaactgccttccatttactctgtggaatttcacgtgtgctttgcattcccagtaaattagtactgggagtgtgtctttgcaatagatataatttcctgccttcaagtcagcactgccccccccccgaagttatttctttgcaggacagtcagagctatattgatatagcaagaggtgtgttacaaaaacaccaggacactgttgagttcctttgtgtttggactctcccctgggcgacagtgttgaggcactgttaagtcaggagctcggggccaccggtggatcactgaaagctgagactctgttgcttctcccgtttgacactctgttgctttccttgcatggtggctcacctaaggctgagactcttgttctccttccctgtataatcttgcctggcgttgcacttgttccccagtgtgtgaactcggagatgagtttacaccaccactgttagttcacgttttttgtttttacataaccatcctgaactcaggtcaatttttagctggctatttgaaaataaacttcaaaagaacttgcca

SEQ ID NO: 30 - protein, 13 aa, Rattus norvegicus
ALGRGPPSRRWIR

SEQ ID NO: 31 - DNA, 1800 bp, Rattus norvegicus
  CDS (134)..(1642)
tcctataacccacctcagggttatggacaacagaaccagtacaacagcagcagtggaggtggtggagggggcggtggaggcaactatggccaagatcagtcctctatgagtggcggcggcggtggtggtggttatggcaggagtgtttgacatagacctggaccagccagaggatgcaggctctgaggatgagctggaggaggggggtcagttaaatgaaagcatggaccatgggggagttggaccatatgaacttggcatggaacattgtgagaaatttgaaatctcagaaactagtgtgaacagagggccagaaaaaatcagaccagaatgttttgagctacttcgggtacttggtaaagggggctatggaaaggtttttcaagtacgaaaagtaacaggagcaaatactgggaagatatttgccatgaaggtgcttaaaaaggcaatgatagtaagaaatgctaaagatacagctcatacaaaagcagagcggaatattctggaggaagtaaagcatcccttcatcgtggatttaatttatgcctttcagaccggtggaaaactctacctcatccttgagtatctcagtggaggagaactatttatgcagttagaaagagaggggatattcatggaagatacagcttgcttttacttggctgaaatctccatggctttggggcatttacatcaaaaagggatcatctacagagacctgaagccggagaacatcatgcttaatcaccaaggtcacgtgaagctgacagactttggactatgcaaagaatctattcatgatggaacagtcacgcacacattttgtggaacaatagaatacatggcccctgaaatcttgatgagaagcggccacaaccgtgctgtggattggtggagtttgggagcattaatgtatgacatgctgactggagcacctccattcactggggagaatagaaagaaaacaattgacaaaatcctcaaatgtaaacttaatttgcctccctacctcacacaagaagctcgagatctgcttaaaaagctgctgaaaagaaatgctgcttctcgtcttggagctggccctggggatgctggagaagtccaagcgcatccattttttagacacattaactgggaagagcttttggctcggaaggtggagcccccctttaagcctctgttgcaatctgaagaggatgtgagtcagtttgattcaaagtttactcgtcagacacctgttgacagccccgatgactcaactctcagtgaaagtgccaaccaggtctttctgggttttacatatgtggctccatctgtacttgaaagtgtgaaagaaaagttttcttttgaaccaaaaatccgatcgcctcgaagatttattggtagcccacgaacgcctgtcagcccagtcaaattctctcctggggatttctggggacgaggtgcttcagccagcacagcaaatcctcagacacctgtggaatacccaatggaaacaagtggaatagagcagatggatgtgacaacgagcggggaagcttcagcgccacttccaatccgacagcccaactctgggccatacaaaaaacaagcttttcctatgatctccaaacggccagagcacctgcgtatgaatctatgatgaaacaatgcttttattaatgcaaatgcaaaaaggaaacaaatcctggaaggggatgtgtgaggatcctgcaagataaaaatgagaaaatggcagtctcaaagagtcagtgtcattacctggaatgctttcgatggaggaaaaaataaacatggatt

SEQ ID NO: 32 - protein, 502 aa, Rattus norvegicus
MAGVFDIDLDQPEDAGSEDELEEGGQLNESMDHGGVGPYELGMEHCEKFEISETSVNRGPEKIRPECFELLRVLGKGGYGKVFQVRKVTGANTGKIFAMKVLKKAMIVRNAKDTAHTKAERNILEEVKHPFIVDLIYAFQTGGKLYLILEYLSGGELFMQLEREGIFMEDTACFYLAEISMALGHLHQKGIIYRDLKPENIMLNHQGHVKLTDFGLCKESIHDGTVTHTFCGTIEYMAPEILMRSGHNRAVDWWSLGALMYDMLTGAPPFTGENRKKTIDKILKCKLNLPPYLTQEARDLLKKLLKRNAASRLGAGPGDAGEVQAHPFFRHINWEELLARKVEPPFKPLLQSEEDVSQFDSKFTRQTPVDSPDDSTLSESANQVFLGFTYVAPSVLESVKEKFSFEPKIRSPRRFIGSPRTPVSPVKFSPGDFWGRGASASTANPQTPVEYPMETSGIEQMDVTTSGEASAPLPIRQPNSGPYKKQAFPMISKRPEHLRMNL

SEQ ID NO: 33 - DNA, 2287 bp, Rattus norvegicus
  CDS (22)..(1599)
gtctgcggcgggtccgggcccatgaggcgacgacggaggcgggacggcttttacccagcgcctgacttccgacacagggaagctgaggacatggcaggagtgtttgacatagacctggaccagccagaggatgcaggctctgaggatgagctggaggaggggggtcagttaaatgaaagcatggaccatgggggagttggaccatatgaacttggcatggaacattgtgagaaatttgaaatctcagaaactagtgtgaacagagggccagaaaaaatcagaccagaatgttttgagctacttcgggtacttggtaaagggggctatggaaaggtttttcaagtacgaaaagtaacaggagcaaatactgggaagatatttgccatgaaggtgcttaaaaaggcaatgatagtaagaaatgctaaagatacagctcatacaaaagcagagcggaatattctggaggaagtaaagcatcccttcattgtggatttaatttatgcctttcagaccggtggaaaactctacctcatccttgagtatctcagtggaggagaactatttatgcagttagaaagagaggggatattcatggaagatacagcttgcttttacttggctgaaatctccatggctttggggcatttacatcaaaaggggattatctacagagacctgaagccggagaacatcatgcttaatcaccaaggtcacgtgaagctgacagactttggactatgcaaagaatctattcatgatggaacagtcacgcacacattttgtggaacaatagaatacatggcccctgaaatcttgatgagaagcggccacaaccgtgctgtggattggtggagtctgggagcattaatgtatgacatgctgactggagcacctccattcactggggagaatagaaagaagacaattgacaaaatcctcaaatgtaaacttaatttgcctccctacctcacacaagaagctcgagatctgcttaaaaagctgctgaagagaaatgctgcttctcgtcttggagctggccctggggatgctggagaagtccaagcgcatccattttttagacacattaactgggaagagcttttggctcggaaggtggagcgcccctttaagcctctgttgcaatctgaagaggatgtgagtcagtttgattcaaagtttactcgtcagacacctgttgacagccccgatgactcaactctcagtgaaagtgccaaccaggtctttctgggttttacatatgtggctccatctgtacttgaaagtgtgaaagaaaagttttcttttgaaccaaaaatccgatcgcctcgaagatttattggtagcccacgaacgcctgtcagcccagtcaaattctctcctggggatttctggggacgaggtgcttcagccagcacagcaaatcctcagacacctgtggaatacccaatggaaacaagtggaatagagcagatggatgtgacaacgagcggggaagcttcagcgccacttccaatccgacagcccaactctgggccatacaaaaaacaagcttttcctatgatctccaaacggccagagcacctgcgtatgaatctatgatgaaacaatgcttttattaatgcaaatgcaaaaaggaaacaaatcctggaagggcatgtgtgaggatcctgcaagataaaaatgagaaaatggcagtctcaaagagtcagtgtcattacctggaatgctttcgatggaggaaaaaataaacatggatttttaaaaaaatcaatcaatggtgcaaaaaataaacccacaaaaaactcaaacaaaatagtattgtggaacccacagacacatcaactgactggttcctaccctagcaacatctcagcgttcgtaaggattctcatgctgatggccgtaaactgacagtattaagggtaggatgttgcttctgaatcactggtaaagtctgatgatgtcacataagggttatcctaataggcaaagtacaagattgcctgtaatacttgcaactaaggacaaattagcatgcaagctttgtcaaactttttccagcaacacagaatcaaagacaaaagaaacttatcgattgatgttttacgtgcaaacaacctgaatcttttttttatataaatatatatttttcaaatagatttttgattcagctcattatgaaaaacatcccaaactttaaaatgcgaagttattggttggtgtgaagaaagccagcttctgttcttctcttgatgaaataaaatgcaaatggatcattgttaaaaaa

SEQ ID NO: 34 - protein, 525 aa, Rattus norvegicus
MRRRRRRDGFYPAPDFRHREAEDMAGVFDIDLDQPEDAGSEDELEEGGQLNESMDHGGVGPYELGMEHCEKFEISETSVNRGPEKIRPECFELLRVLGKGGYGKVFQVRKVTGANTGKIFAMKVLKKAMIVRNAKDTAHTKAERNILEEVKHPFIVDLIYAFQTGGKLYLILEYLSGGELFMQLEREGIFMEDTACFYLAEISMALGHLHQKGIIYRDLKPENIMLNHQGHVKLTDFGLCKESIHDGTVTHTFCGTIEYMAPEILMRSGHNRAVDWWSLGALMYDMLTGAPPFTGENRKKTIDKILKCKLNLPPYLTQEARDLLKKLLKRNAASRLGAGPGDAGEVQAHPFFRHINWEELLARKVERPFKPLLQSEEDVSQFDSKFTRQTPVDSPDDSTLSESANQVFLGFTYVAPSVLESVKEKFSFEPKIRSPRRFIGSPRTPVSPVKFSPGDFWGRGASASTANPQTPVEYPMETSGIEQMDVTTSGEASAPLPIRQPNSGPYKKQAFPMISKRPEHLRMNL

SEQ ID NO: 35 - DNA, 1671 bp, Rattus norvegicus
  CDS (130)..(1341)
aacacaccagggaagtgacaaccctgaacatcaggtgtcagcaaacacagaggctggcagctggctggtatcagctctgcagccaggaggacagagaagatggccttcattgcagctttggggctcttgatggcagggatctgccctgctgtcctctgtgatggcacactgggaagggacactctatcccatgaagaccacggcaaggggagacaactgcacagtctcacattggcttccagcaacactgacttcgcattgagcctctacaagaagctggctttgaggaatccagataaaaatgttgtcttctcccctcttagcatctcagctgccttgaccattttgtctctgggagcaaaagacagcaccatggaagagattctagaaggtctcaagttcaatctcacagagatcactgaggaagaaatccaccagggctttgggcacctcctacagaggctcagccagccagaggaccaggtagagatcaatacaggtagtgccctgtttattgacaaagagcagccgatactgtcagaattccaggagaagacaagggctctgtaccaggctgaggccttcatagctgacttcaagcagcccaatgaggccaaaaagctcatcaatgactatgtgagcaatcagacccaggggaagatcgcagaactgttctcagacctggaggagaggacatccatggtgctggtgaactatctcctatttaaaggcaaatggaaggtcccctttaaccctaatgacacatttgagtctgagttctacttggatgagaagaggtctgtgaaggtgcccatgatgaaaattaaggaagtaaccacaccctatgtccgggatgaggaactctcctgctctgtgttggagctgaagtacacaggaaatgccagcgccctgtttatcctccctgaccaaggcaagatgcagcaggtggaatccagcttgcaaccagagaccctgaagaagtggaaggactctttgatccctaggattataaatgatctccgcatgcccaagttctccatctccacagactacagtctaaaagaggtccttccagagctgggcattaagaaagtcttctcccagcaagctgatctgagtaggatcacagggaccaaggatctgtatgtctctcaagtggtccacaaggctgtgctggatgtggatgagacaggcacagaagcaactgctgctacaggggtcgctacagtcatacgtagacaacctcgaactctgaatttcaaccggccattcatggtggttatcactgacatggatagtcagtctatcctctttgttgccaaaatcactaaccccaagtaagcccaaagctccccaagatctgacagttctgcccaggaccctgggactgagcctgcatgtggatctctgtatatgtcctgacattcatgctctgattggtgtttcaaagttgtcttagacagtgacatcgactatctctatggcccccatgtgcacaggagcctttagactgtcagtgtcaggctcttaggccccttgggagcatctacccatgtttctgaacctggaaatctatctttatttttccctagtgactcctctttctgtgttcataccccaaacctagttattggcaagtacatccagtcccaataaataaatgctttgagc

SEQ ID NO: 36 - protein, 403 aa, Rattus norvegicus
MAGICPAVLCDGTLGRDTLSHEDHGKGRQLHSLTLASSNTDFALSLYKKLALRNPDKNVVFSPLSISAALTILSLGAKDSTMEEILEGLKFNLTEITEEEIHQGFGHLLQRLSQPEDQVEINTGSALFIDKEQPILSEFQEKTRALYQAEAFIADFKQPNEAKKLINDYVSNQTQGKIAELFSDLEERTSMVLVNYLLFKGKWKVPFNPNDTFESEFYLDEKRSVKVPMMKIKEVTTPYVRDEELSCSVLELKYTGNASALFILPDQGKMQQVESSLQPETLKKWKDSLIPRIINDLRMPKFSISTDYSLKEVLPELGIKKVFSQQADLSRITGTKDLYVSQVVHKAVLDVDETGTEATAATGVATVIRRQPRTLNFNRPFMVVITDMDSQSILFVAKITNPK

SEQ ID NO: 37 - DNA, 1377 bp, Rattus norvegicus
  CDS (77)..(1045)
agactgtgcagttgtctcccctcttagcatctcagctgccttgaccattttgtctctgggagcaaaagacagcaccatggaagagattctagaaggtctcaagttcaatctcacagagatcactgaggaagaaatccaccagggctttgggcacctcctacagaggctcagccagccagaggaccaggtagagatcaatacaggtagtgccctgtttattgacaaagagcagccgatactgtcagaattccaggagaagacaagggctctgtaccaggctgaggccttcatagctgacttcaagcagcccaatgaggccaaaaagctcatcaatgactatgtgagcaatcagacccaggggaagatcgcagaactgttctcagacctggaggagaggacatccatggtgctggtgaactatctcctatttaaaggcaaatggaaggtcccctttaaccctaatgacacatttgagtctgagttctacttggatgagaagaggtctgtgaaggtgcccatgatgaaaattaaggaactaaccacaccctatgtccgggatgaggaactctcctgctctgtgttggagctgaagtacacaggaaatgccagcgccctgtttatcctccctgaccaaggcaagatgcagcaggtggaatccagcttgcaaccagagaccctgaagaagtggaaggactctttgatccctaggattataaatgatctccgcatgcccaagttctccatctccacagactacagtctaaaagaggtccttccagagctgggcattaagaaagtcttctcccagcaagctgatctgagtaggatcacagggaccaaggatctgtatgtctctcaagtggtccacaaggctgtgctggatgtggatgagacaggcacagaagcaactgctgctacaggggtcgctacagtcatacgtagacaacctcgaactctgaatttcaaccggccattcatggtggttatcactgacatggatagtcagtctatcctctttgttgccaaaatcactaaccccaagtaagcccaaagctccccaagatctgacagttctgcccaggaccctgggactgagcctgcatgtggatctctgtacatgtcctgacattcatgctctgattggctgtttcaaagttgtcttagacagtgacatcgactatctctatggcccccatgtgcacaggagcctttagactgtcagtgtcaggctcttaggccccttgggagcatctacccatgtttctgaacctggaatctatctttatttttccctagtgactcctctttctgtgttcataccccaaacctagttattggcaagtacatccagtcccaataaataaatgctttgagcac

SEQ ID NO: 38 - protein, 322 aa, Rattus norvegicus
MEEILEGLKFNLTEITEEEIHQGFGHLLQRLSQPEDQVEINTGSALFIDKEQPILSEFQEKTRALYQAEAFIADFKQPNEAKKLINDYVSNQTQGKIAELFSDLEERTSMVLVNYLLFKGKWKVPFNPNDTFESEFYLDEKRSVKVPMMKIKELTTPYVRDEELSCSVLELKYTGNASALFILPDQGKMQQVESSLQPETLKKWKDSLIPRIINDLRMPKFSISTDYSLKEVLPELGIKKVFSQQADLSRITGTKDLYVSQVVHKAVLDVDETGTEATAATGVATVIRRQPRTLNFNRPFMVVITDMDSQSILFVAKITNPK

SEQ ID NO: 39 - DNA, 1516 bp, Rattus norvegicus
  CDS (55)..(1437)
tatataaggtcagcctcttgcccatgctgtcctgtgtggtctttgcagctcgccatggctaggacagtagtagcactaaatatcctggtattgctgggcctgtgctggtccctggctgttgccaaccctcttcctgctgcccatgagactgttgctaaaggtgaaaatgggaccaagccagactcagatgtaatcgaacactgctcagatgcctggagctttgacgctaccaccatggatcacaatgggaccatgctgttctttaaaggggagtttgtgtggaggggtcactcagggatccgggagttaatctcagagaggtggaagaatcccgtcacctcagtggatgctgcattccgtggtcctgacagtgtcttcctgatcaaggaagacaaagtctgggtgtatcctcctgaaaagaaagagaacgggtatccaaagttgttccaagaagagtctcctggaatcccatacccaccagacgcagctgtggaatgccaccgtggagaatgccagagtgaaggtgtcctcttcttccaaggtaaccgcaagtggttctgggactttgccacaagaacccaaaaggaacgttcctggcctgctgttgggaattgcactgcggccttgaggtggcttgaacgctactactgcttccagggtaacaagttcctgagatttaaccccgtcacaggagaggtgcctcccagataccctctggatgcccgtgactacttcatatcctgccctggcagaggccatggtaaactaagaaatggaactgctcatgggaatagcacccatcctatgcattcgcgttgtaacgcagatcctggcctgtctgcactgctgtctgaccatcgaggtgccacctatgccttcagtggctcccactactggcgtctggactccagccgtgatgggtggcatagctggcccattgctcatcactggccccagggtccttcagcagtagatgctgccttttcctgggatgagaaagtctatctgatccagggcactcaagtatatgtcttcctgacgaaggggggcaataacctagtaagtggttatccaaagcggctggagaaggaacttgggagccctcccgggatcagccttgataccatagatgcagccttttcctgccctggttcttccaagctctacgtcacatcaggacggcggctttggtggctggacctgaagtcaggagcccaggcgacatgggcagagctttcctggccccatgagaaagttgatggtgccctgtgtttggaaaagtcccttggtccctactcatgctcttccaatggtcccaacttgttctttatccatgggcccaatttatactgctatagcagtatagacaaactgaatgcagccaagagtctgcctcagccccagaaagtgaacagcatccttggctgcagtcaataaaaagccctgatgggaattagcccagcccaccccacctctccatttccattctaataaaaccagatggtttcttcacatg

SEQ ID NO: 40 - protein, 460 aa, Rattus norvegicus
MARTVVALNILVLLGLCWSLAVANPLPAAHETVAKGENGTKPDSDVIEHCSDAWSFDATTMDHNGTMLFFKGEFVWRGHSGIRELISERWKNPVTSVDAAFRGPDSVFLIKEDKVWVYPPEKKENGYPKLFQEESPGIPYPPDAAVECHRGECQSEGVLFFQGNRKWFWDFATRTQKERSWPAVGNCTAALRWLERYYCFQGNKFLRFNPVTGEVPPRYPLDARDYFISCPGRGHGKLRNGTAHGNSTHPMHSRCNADPGLSALLSDHRGATYAFSGSHYWRLDSSRDGWHSWPIAHHWPQGPSAVDAAFSWDEKVYLIQGTQVYVFLTKGGNNLVSGYPKRLEKELGSPPGISLDTIDAAFSCPGSSKLYVTSGRRLWWLDLKSGAQATWAELSWPHEKVDGALCLEKSLGPYSCSSNGPNLFFIHGPNLYCYSSIDKLNAAKSLPQPQKVNSILGCSQ

SEQ ID NO: 41 - DNA, 1956 bp, Rattus norvegicus
  CDS (1)..(1827)
atgaagtgggtaacctttctcctcctcctcttcatctccggttctgccttttctaggggtgtgtttcgccgagaagcacacaagagtgagatcgcccatcggtttaaggacttaggagaacagcatttcaaaggcctagtcctgattgccttttcccagtatctccagaaatgcccatatgaagagcatatcaaattggtgcaggaagtaacagactttgcaaaaacatgtgtcgctgatgagaatgccgaaaactgtgacaagtccattcacactctcttcggagacaagttatgcgccattccaaagcttcgtgacaactacggtgaactggctgactgctgtgcaaaacaagagcccgaaagaaacgagtgtttcctgcagcacaaggatgacaaccccaacctgccacccttccagaggccggaggctgaggccatgtgcacctccttccaggagaaccctaccagctttctgggacactatttgcatgaagttgccaggagacatccttatttctatgccccagaactcctttactatgctgagaaatacaatgaggttctgacccagtgctgcacagagtctgacaaagcagcctgcctgacaccgaagcttgatgccgtgaaagagaaagcactggtcgcagctgtccgtcagaggatgaagtgctccagtatgcagagatttggagagagagccttcaaagcctgggcagtagctcgtatgagccagagattccccaatgctgagttcgcagaaatcaccaaattggcaacagacgttaccaaaatcaacaaggagtgctgtcacggcgacctgttggaatgcgcggatgacagggcagaacttgccaagtacatgtgtgagaaccaggccactatctccagcaaactgcaggcttgctgtgataagccagtgctgcagaaatcccagtgtctcgctgagacagaacatgacaacattcctgccgatctgccctcaatagctgctgactttgttgaggataaggaagtgtgtaagaactatgctgaggccaaggatgtcttcctgggcacgtttttgtatgaatattcaagaaggcaccccgattactccgtgtccctgctgctgagacttgctaagaaatatgaagccacactggagaagtgctgtgctgaaggcgatcctcctgcctgctacggcacagtgcttgcagaatttcagcctcttgtagaagaacctaagaacttggtcaaaactaactgtgagctttacgagaagcttggagagtatggattccaaaacgccgttctggttcgatacacccagaaagcacctcaggtgtcgaccccaactctcgtggaggcagcaagaaacctgggaagagtgggcaccaagtgttgtacccttcctgaagctcagagactgccctgtgtggaagactatctgtctgccatcctgaaccgtctgtgtgtgctgcatgagaagaccccagtgagcgagaaggtcaccaagtgctgtagtgggtccttggtggaaagacggccatgtttctctgctctgacagttgacgagacatatgtccccaaagagtttaaagctgagaccttcaccttccactctgatatctgcacactcccagacaaggagaagcagataaagaagcaaacggctctcgctgagctggtgaaacacaagcccaaggccacagaagatcagctgaagacggtgatgggtgacttcgcacaattcgtggacaagtgttgcaaggctgccgacaaggataactgcttcgccactgaggggccaaaccttgttgctagaagcaaagaagccttagcctaaacacatcacaaccatctcaggctaccctgagaaaaaaagacatgaagactcaggactcatctcttctgttggtgtaaaaccaacaccctaaggaacacaaatttctttgaacatttgacttcttttctc

SEQ ID NO: 42 - protein, 608 aa, Rattus norvegicus
MKWVTFLLLLFISGSAFSRGVFRREAHKSEIAHRFKDLGEQHFKGLVLIAFSQYLQKCPYEEHIKLVQEVTDFAKTCVADENAENCDKSIHTLFGDKLCAIPKLRDNYGELADCCAKQEPERNECFLQHKDDNPNLPPFQRPEAEAMCTSFQENPTSFLGHYLHEVARRHPYFYAPELLYYAEKYNEVLTQCCTESDKAACLTPKLDAVKEKALVAAVRQRMKCSSMQRFGERAFKAWAVARMSQRFPNAEFAEITKLATDVTKINKECCHGDLLECADDRAELAKYMCENQATISSKLQACCDKPVLQKSQCLAETEHDNIPADLPSIAADFVEDKEVCKNYAEAKDVFLGTFLYEYSRRHPDYSVSLLLRLAKKYEATLEKCCAEGDPPACYGTVLAEFQPLVEEPKNLVKTNCELYEKLGEYGFQNAVLVRYTQKAPQVSTPTLVEAARNLGRVGTKCCTLPEAQRLPCVEDYLSAILNRLCVLHEKTPVSEKVTKCCSGSLVERRPCFSALTVDETYVPKEFKAETFTFHSDICTLPDKEKQIKKQTALAELVKHKPKATEDQLKTVMGDFAQFVDKCCKAADKDNCFATEGPNLVARSKEALA

SEQ ID NO: 43 - DNA, 2348 bp, Rattus norvegicus
  CDS (1)..(1866)
ctggatgaggagatggaagctaagcaaaaccttgagcgccatgtctccaccttgaacattcagctctcagactctaagaagaagctgcaggaccttgcaagcactattgaggtcatggaggaggggaagaagaggttgcagaaagagatggagggtctcggccagcagtatgaggagaaggccgctgcctatgacaaactggagaaaactaagaacaggcttcagcaggagctagatgacttggtcgtggacttggacaaccagcggcaactggtatccaatctggaaaagaagcagaagaaattcgatcagttgttagctgaggaaaagaacatctcctccaagtatgcggatgagagagaccgagctgaagcagaggccagggaaaaggaaacgaaggctttgtctctggcccgggccctggaggaagccctggaagccaaagaggaactggaaaggaccaacaagatgctcaaggccgagatggaagacctggtcagctccaaggatgacgtgggcaagaatgtgcacgagctggagaagtccaaacgagccctggagacccagatggaagagatgagaactcagctagaggagctggaggacgagctgcaggccactgaagacgccaagctgcggctggaggtcaacatgcaggccctcaagggccagtttgaacgagatctccaggctcgggatgagcagaatgaggagaagaggaggcagctacagcggcagctgcatgagtatgagacagaactggaagatgaacggaagcaaagggctctggcggcagcagccaagaagaagctggaaggggatctgaaagacctggaactccaggctgactcagccgtcaaagggagggaggaagccatcaagcagcttcgaaaactgcaggctcagatgaaggacttccaaagagagctggatgatgcccgtgcctccagagatgagatctttgccacctcaaaagagaatgagaagaaagccaagagtctggaggcagagctcatgcagctccaggaggacctggcagcagctgagagagctcgcaagcaagctgacctggagaaggaggagctggctgaggagctggctagcagcttatcaggaaggaatacactgcaggatgagaagcgccgcctggaggcaaggatcgcccagctggaggaggagctggaggaagagcagggcaacatggaggccatgagtgacagagtccgcaaggccacattgcaggctgagcaactgagcaatgagctggtcactgagcgcagtgcagctcagaagaatgagagtgcacggcaacagctggagcgccagaacaaggaactccgaagcaagttgcaggaggtagaaggtgctgtcaaagccaagcttaagtccactgttgcggcactagaggccaagattgtgcagctggaggagcagattgaacaagaggccagagaaaaacaggcagccaccaagttgctgaagcaaaaggacaagaagctaaaggaggtcctactgcaggtggaggatgagcgcaagatggtggagcagtacaaggagcaggcagagaaaggaaacaccaaggtcaagcagctcaagaggcagctggaagaggccgaggaggaatcccagcgcatcaatgccaaccgcaggaagctgcagcgggagctggatgaggccactgagagcaatgaggccatgggccgtgaggtgaatgccctcaagagcaaactcaggagaggaaacgaggcttcatttgttccttccagaagggctggaggccgtagagttattgaaaacacagatggttctgaagaagaaatggatgctcgggactcagacttcaatggaaccaaagccagtgaataaattcagttggacactatgtcagggaaaacaaaataccaaatgacagcaaagcccagcaggctgattagcatttgtctccattcgttctcaagtcatagacattaccccacctctcaccaggagtcaaccacagccctgcacaaaggatgtgaatttaagtttttaaatgtgctaccagagaaaatccagatagatgcaggtcgggagctgcagtcgccagtgcctttgtttacatgaaatggaacgttacgtgaatgggtgccccagcgccaacccgctcccaaccatcaactgcctgaccttccagtttgggaggaaaacctgtttgaaaattcccctccctttcctgcctgcacacctcagacacacagttcactaagaccaagtgactttttcagtcatctgaattaaggaagagcagagcgagcgcaccgccttatttgcacccacggacactttcacgaataaaaggttttaagtca

SEQ ID NO: 44 - protein, 621 aa, Rattus norvegicus
LDEEMEAKQNLERHVSTLNIQLSDSKKKLQDLASTIEVMEEGKKRLQKEMEGLGQQYEEKAAAYDKLEKTKNRLQQELDDLVVDLDNQRQLVSNLEKKQKKFDQLLAEEKNISSKYADERDRAEAEAREKETKALSLARALEEALEAKEELERTNKMLKAEMEDLVSSKDDVGKNVHELEKSKRALETQMEEMRTQLEELEDELQATEDAKLRLEVNMQALKGQFERDLQARDEQNEEKRRQLQRQLHEYETELEDERKQRALAAAAKKKLEGDLKDLELQADSAVKGREEAIKQLRKLQAQMKDFQRELDDARASRDEIFATSKENEKKAKSLEAELMQLQEDLAAAERARKQADLEKEELAEELASSLSGRNTLQDEKRRLEARIAQLEEELEEEQGNMEAMSDRVRKATLQAEQLSNELVTERSAAQKNESARQQLERQNKELRSKLQEVEGAVKAKLKSTVAALEAKIVQLEEQIEQEAREKQAATKLLKQKDKKLKEVLLQVEDERKMVEQYKEQAEKGNTKVKQLKRQLEEAEEESQRINANRRKLQRELDEATESNEAMGREVNALKSKLRRGNEASFVPSRRAGGRRVIENTDGSEEEMDARDSDFNGTKASE

SEQ ID NO: 45 - DNA, 361 bp, Rattus norvegicus
  CDS (30)..(299)
gcacgaggtgaaaggaaatttttatcgacatggcaactgaactggagaaggccttgagcaacgtcattgaagtctaccacaattattctggtataaaagggaatcaccatgccctctacagggatgacttcaggaaaatggtcactactgagtgccctcagtttgtgcagaataaaaataccgaaagcttgttcaaagaattggacgtcaatagtgacaacgcaattaacttcgaagagttccttgcgttggtgataagggtgggcgtggcagctcataaagacagccacaaggagtaacagagcttctggcctgggctgggtcccttggatatgtctacagaataaagtcgtcatatctt

SEQ ID NO: 46 - protein, 89 aa, Rattus norvegicus
MATELEKALSNVIEVYHNYSGIKGNHHALYRDDFRKMVTTECPQFVQNKNTESLFKELDVNSDNAINFEEFLALVIRVGVAAHKDSHKE

SEQ ID NO: 47 - DNA, 6257 bp, Rattus norvegicus
  CDS (1229)..(5224)
ggagcaaccagattttgtggtacagaatttagcattgaatataaggggtattataccaagcctctacagggcacttagcctgcatcccaatcccacccaatccccacacacacttcttttggaagacaaggtccacgtagcctgacctagaacttgtactgtagctgagctgaccttgaacttcaggtcctccctacttcacttcccaagtgctgaggttgcaggtgtgaccaccatgcaggccctgtgggcaaaatcttgcccagggaaggaagttagtcctgatctttgggactttgaaggatgggaccttgtgtacccttacctaggaaacaagaaaaagtcattgtgactacaacattgttcagggcacatgacactccccaggaataacctgaatcctcgtattctagaaccaaagagtggcaggcatggtaatgtgcaccataactatttatcttattttattttattggtttgtgttgagacatttctatatataaccctggctgtccagaaactcactatgtagaccaagttgatctacatcacagattattagagcctagaatcacagagatctgcctgcctctggcatcaaagtgctgggatttcaggtgtgcaccactatacccagctcccaaacttctaataggaacaataaaatcagtgatccagaatccaggtccacgacagcaacatttttgcccttctcaacaaaaaggaaacgacatatatgaggggagcttgcagccttcttggctgtcactggtgcaaagaatttgttctaatggctgatttctgaggataatcttggtcttgaggtgcaggacctaccttagagctgtgcgctgggggtcactttctcctccatccacctattacaccccttcactattacccctgaccttgccatttggctttaatcaccaaaacatgaacaggtactggagaaccaggcactgccctacccaatctcagccctgggaaggtatccagggtgacctagagcctactggacagcaggtgcaacagggccctcccctcccacagccaagagggtgagagcacggaatccacctccgtcagcaagggaggggcttagccagcatatgagtgccaacaggacaggggtggggctgggggagaactaggagtttttaaaggctccccaaggaggctcctcagctccaagatcaccacctgctgcccctggacacctgataccatgtggttcctgatcctattcctcgacctgtccctggggcagattggtgagacacggggggaagctggtggggtcacacccctgactgttatgctgcctttggccctggatatccccttctcctctcccctggccccagctacattctaaagcaccacttgttcctcactctctgcccctgcacactgccaagtccctcacagtcctccgatgccaggcccctgttctctcccattttccagaactgtctcctcttccttagccgcctgattgtctctgagcttctccagtctttccaaagaatctttccaacccctgatgaacgttaggacctcggttcccctctctttgttgttttccctagagcctaataatgcaacccctgagtcaggagcttgcccaaatcccacaatagagctcttggctgtccagcagctgtcagcttcagctgtgttctccacatcatgacaactggtcctccatcttctcaagttgctcagtttctattgacagtttcatttcccaaattggcttgtgacatcagatgagtctccccacactttctgctgtggggaattggcctatggcccttctccatgactttttggttacgtctggttttgggaggaggaatcaggtgtcagaagccattcatggacatcaaggatcttcctcgatcacttggatagggtctcactgaatggggagtttctctttaagctaacttggctgtctggaaggactcaggggactcctactgcttccacctctggtgttacaggggcacactgccacacctgaccttttacctaggttctggggagttcagatcaggtcctaatgcttacacagccaatactgtagcaaccaagccatctgcccagctcttgggaataagcactgagctagtgtctcatggtgaaattctggcttgtgtctggtccatggccttcctcctgcctcagccttctgtgtgctgggattacagataagtgcttgcaagcttccgtgtttcctaacgcagtgctttggcccactattccctcccatgctgcccactctcagccacacactacttgttgtttctagccccaccagctcctgtcctacctcgctggaaccccactgcacaactctaggtcccattctgtgcaggacatcccaagacccaacacgtaaccctagcaccccacaccaactgggtcctcctgtctgtcgcacagtggtctgacttgtttaactccttttccacccctgtgctgtcttgaggctgcctccaagagaaccctgaacctcaccaacacactgatcatttgcccctgcccactccgtgggaagcaggaccttcccctcacatcccccaaagtctccttctcccactgcttgtccaggctcaaactatgttcttagggagccccaccctcttaggtatcatctccaacacagaccctaacaggagaccacacccaatcctcgaccctgcccctttgatctggaaacccctcattctcttctatgccagctggttgcctcatgcccaatccaataatcccgaagtcatcctgaagctcccgtttctgcattcatttattccctcaaatctagttatcagggggcctcaccctttccagaattcccaaaacccaaccaaggccctgatgtcttctcaagctttggagactttaaatgcgaaagtgtcttggcctctgatttcactctcattaaactaggaatgctctctctctctctctctctctctctctctctctctctctctctctctctctctctctctctctgactgcctgccatcccataactttgttacccaacagtacatccataccccctatctgttccaaccataccccaccccctgtgcacctgttacagatgctgcacctcccggccagtctcgggttattggaggatataaatgtgagaagaattcccaaccctggcaagtggctctatacagcttcacgaaatacctctgcgggggtgtcctgatagaccccagctgggtgatcacggctgcccactgctctagcaagtgagtaacggaggggacaggaatgactagaggacgggctgggttgctgaagggcaggagggtgggactggctcaaagacaaaagaggacaagcaggactggacccatggtctgtccatgacctcctgtgtctgtctttgcttctctctcaaggcttgtgttcatgttctggttctttcttttctatcttattgttcatgtctcctgtctgtattcacatctgagtgtctctatggccatctgtatctctgtgtctcctcctcctcttggcccatctcagtctgggtctgggtctcatgtgtcctcttttattactactgacaatactgacctaaaggcctctaggatacaaagtcatatccttgactgtagggtgtccctgaatgtagggtgtgagagaagtcctcactctcctcagaccagctcagcctttagaccttctgtccactcacaggacacagggaagggcaggtcagagctggagctgggtgaagtaactgagtacagagggagagcagatgctggtgtgggggaggggagttagggaaggggagctcagacttgggctgtgggccaggccttacctactggggaagttcagcccagttccagctgcacctgagcagctctcagtccctccccctcctcccttccccctcttcccttgttctgtctctgtctctctgtctctaaatgtgtgtatatatgtgcctttctgtgtgtgtgtgtgtgtgcatgtgtgtgtgtatgtatgtgtctgtgtatgtatgtatgtgcaagtatgtgtgtgtttctgtctgactctctcttcctttctccctccctccctcatcccccttttcctctattctgcccaatctccctggttgcctcttctctttcaatccatctcctttcctgccctcagcaattaccaggtttggctgggccgaaacaacctattagaagatgaaccatttgctcagcaccggcttgtcagtcaaagcttccctcaccctgactacaaaccattcctcatgaggaaccacacccgaaaacctggcgatgaccacagcaatgatctgatgctgctacatctcagccagcctgcggacatcacagatggggtgaaggtcatcgatctgcccactgaggagcccaaggtggggagcacctgccttgcctcaggctggggcagtaccaaaccccttatatgtaagtctgagccaggaaacacagctgggtgtgagggagaggcacagaggacctggctgggttctgctcaccaccctcttgcctcctggtccacaggggaattccctgatgatctccagtgtgtgaacatccacctactgtctaatgagaagtgcatcaaagcctacaaagaaaaggtgacagatctgatgctgtgtgcaggagagttggaaggaggcaaagacacttgcacggtgagacagcccctcctgcggtgaggtgaagggctgagagagggaactgaggttctcaattcccacttccacaccctgtctaagcagacgcttggtttccttccttatggaagtgatgtgagctgggaggggaggatcctggagctggtactattcctcctcattgacttggcttcagggactggcctgtccacccctcactcgctgtaagagctgggctcccaggagctgggttcccttccctactggccacaactgtctcttagagtctccctgtattcctcccatgaagtctagttccaggttgtcaagtagaacccaactgccaattccttcttactcttttccctctcctttcagggtgactcaggaggccccctcctctgtgatggtgtgctccagggcatcacatcatggggctctgtcccatgcgccaaaaccaacatgccagccatctacaccaaacttattaagttcacctcctggataaaagaagttatgaaggaaaacccctgagtgtcacactgtcccctggtctcaataaaacccatcatgcagcacacaagttcaagttctgattctctctcaccttctggagtctggagctggggtctgcccagctaaggtcaggacttccaaagcagattggcaatggataggggtccatgtatggttggataaagggattggcttgagacaaaggcagacaaaaggctcagaccatgtcagggatggcccagggttctcctctggcaagtagcatgttcagatcacaaagtttagtcaagttagacacagtagaaagatcaactccagctaggccggaccctacaccaaaagcagaagagatgacaagcagtcaggacactgagaatttagactgccgacctgcttttatcgagtcggggaagccagaaagatggcgggatgttatattaattaagcctttacttcttggggagttgtctgtccacagaagggtaggtactgccccccaaggctaggctgcagagtatctcctagagcccctggaacccctggagcccctggagcccctggagcccctggaacccctggagcccctggagcccctggagggtatatctctggtagggctggaccaaagatgaagggtgacttagcggcatgccctgtggcagagcatcgcccggcttgggaaaagggccacattgctcccactgccttggactacaaaccagtgtgtgcccagagtgatatagccgcagctgagagtattggaggactttcagaggagggtccctgccaagactcaggcagtaaggagtgggccctagagtggggactggggcttgccacctgtgtccccagggtgctacctgctctcaggggaagtatgggacctcaaggaagatctgatggaaactgagccacagggaccgaggtagaggcatcaggctgcggggactcatcagtgtcctgagaagttgcgtcgtccctctgttggggaggctcgaggtatttcacaaaattgcttgcagtagacagcttctgggcgggctccaagctt

SEQ ID NO: 48 - protein, 49 aa, Rattus norvegicus
MWFLILFLDLSLGQIGETRGEAGGVTPLTVMLPLALDIPFSSPLAPATF

SEQ ID NO: 49 - protein, 39 aa, Rattus norvegicus
STTCSSLSAPAHCQVPHSPPMPGPCSLPFSRTVSSSLAA

SEQ ID NO: 50 - protein, 65 aa, Rattus norvegicus
LSLSFSSLSKESFQPLMNVRTSVPLSLLFSLEPNNATPESGACPNPTIELLAVQQLSASAVFSTS

SEQ ID NO: 51 - protein, 13 aa, Rattus norvegicus
QLVLHLLKLLSFY

SEQ ID NO: 52 - protein, 29 aa, Rattus norvegicus
QFHFPNWLVTSDESPHTFCCGELAYGPSP

SEQ ID NO: 53 - protein, 66 aa, Rattus norvegicus
LFGYVWFWEEESGVRSHSWTSRIFLDHLDRVSLNGEFLFKLTWLSGRTQGTPTASTSGVTGAHCHT

SEQ ID NO: 54 - protein, 16 aa, Rattus norvegicus
VLGSSDQVLMLTQPIL

SEQ ID NO: 55 - protein, 10 aa, Rattus norvegicus
QPSHLPSSWE

SEQ ID NO: 56 - protein, 59 aa, Rattus norvegicus
CLMVKFWLVSGPWPSSCLSLLCAGITDKCLQASVFPNAVLWPTIPSHAAHSQPHTTCCF

SEQ ID NO: 57 - protein, 29 aa, Rattus norvegicus
PHQLLSYLAGTPLHNSRSHSVQDIPRPNT

SEQ ID NO: 58 - protein, 74 aa, Rattus norvegicus
HPTPTGSSCLSHSGLTCLTPFPPLCCLEAASKRTLNLTNTLIICPCPLRGKQDLPLTSPKVSFSHCLSRLKLCS

SEQ ID NO: 59 - protein, 5 aa, Rattus norvegicus
GAPPS

SEQ ID NO: 60 - protein, 20 aa, Rattus norvegicus
VSSPTQTLTGDHTQSSTLPL

SEQ ID NO: 61 - protein, 24 aa, Rattus norvegicus
SGNPSFSSMPAGCLMPNPIIPKSS

SEQ ID NO: 62 - protein, 12 aa, Rattus norvegicus
SSRFCIHLFPQI

SEQ ID NO: 63 - protein, 17 aa, Rattus norvegicus
LSGGLTLSRIPKTQPRP

SEQ ID NO: 64 - protein, 8 aa, Rattus norvegicus
CLLKLWRL

SEQ ID NO: 65 - protein, 7 aa, Rattus norvegicus
MRKCLGL

SEQ ID NO: 66 - protein, 4 aa, Rattus norvegicus
FHSH

SEQ ID NO: 67 - protein, 94 aa, Rattus norvegicus
TRNALSLSLSLSLSLSLSLSLSLSLTACHPITLLPNSTSIPPICSNHTPPPVHLLQMLHLPASLGLLEDINVRRIPNPGKWLYTASRNTSAGVS

SEQ ID NO: 68 - protein, 4 aa, Rattus norvegicus
TPAG

SEQ ID NO: 69 - protein, 10 aa, Rattus norvegicus
SRLPTALASE

SEQ ID NO: 70 - protein, 5 aa, Rattus norvegicus
RRGQE

SEQ ID NO: 71 - protein, 7 aa, Rattus norvegicus
LEDGLGC

SEQ ID NO: 72 - protein, 57 aa, Rattus norvegicus
RAGGWDWLKDKRGQAGLDPWSVHDLLCLSLLLSQGLCSCSGSFFSILLFMSPVCIHI

SEQ ID NO: 73 - protein, 36 aa, Rattus norvegicus
VSLWPSVSLCLLLLLAHLSLGLGLMCPLLLLLTILT

SEQ ID NO: 74 - protein, 15 aa, Rattus norvegicus
RPLGYKVISLTVGCP

SEQ ID NO: 75 - protein, 35 aa, Rattus norvegicus
GVREVLTLLRPAQPLDLLSTHRTQGRAGQSWSWVK

SEQ ID NO: 76 - protein, 317 aa, Rattus norvegicus
LSTEGEQMLVWGRGVREGELRLGLWARPYLLGKFSPVPAAPEQLSVPPPPPFPLFPCSVSVSLSLNVCIYVPFCVCVCVHVCVYVCVCVCMYVQVCVCFCLTLSSFLPPSLIPLFLYSAQSPWLPLLFQSISFPALSNYQVWLGRNNLLEDEPFAQHRLVSQSFPHPDYKPFLMRNHTRKPGDDHSNDLMLLHLSQPADITDGVKVIDLPTEEPKVGSTCLASGWGSTKPLICKSEPGNTAGCEGEAQRTWLGSAHHPLASWSTGEFPDDLQCVNIHLLSNEKCIKAYKEKVTDLMLCAGELEGGKDTCTVRQPLLR

SEQ ID NO: 77 - protein, 61 aa, Rattus norvegicus
GEGLREGTEVLNSHFHTLSKQTLGFLPYGSDVSWEGRILELVLFLLIDLASGTGLSTPHSL

SEQ ID NO: 78 - protein, 28 aa, Rattus norvegicus
ELGSQELGSLPYWPQLSLRVSLYSSHEV

SEQ ID NO: 79 - protein, 5 aa, Rattus norvegicus
FQVVK

SEQ ID NO: 80 - protein, 66 aa, Rattus norvegicus
NPTANSFLLFSLSFQGDSGGPLLCDGVLQGITSWGSVPCAKTNMPAIYTKLIKFTSWIKEVMKENP

SEQ ID NO: 81 - DNA, 2444 bp, Rattus norvegicus
  CDS (28)..(1944)
gcagcacaaagcaaccatccttccaggatgattttattcaaacaagtgggttattttgtttccttgttcgctacagtttcctgtgggtgtctgtcacaactgtatgcaaataccttcttcagaggtggggatctggctgccatctacaccccggatgcccagcactgtcagaagatgtgcacgtttcaccctaggtgcctgctcttcagcttccttgccgtgagtccaaccaaggagacagataaaaggtttgggtgcttcatgaaagagagcattacagggactttgccaagaatacaccggacaggggccatttctggtcattctttaaaacagtgtggccatcaattaagtgcttgccaccaagacatatacgaaggactggatatgagagggtccaactttaatatatctaagactgacagtattgaagaatgccagaaactgtgcacaaataatattcactgccaatttttcacatatgctacaaaagcatttcacagaccagagtacaggaagagttgcctgctgaagcgcagttcaagtggaacgcccaccagtataaagccagtggacaacctggtgtctggattctcactgaagtcctgtgctctctcagagatcggttgccccatggatattttccagcactttgcctttgcagacctgaatgtaagccaggtcgtcacccccgatgccttcgtgtgtcgcaccgtttgcaccttccatcccaactgcctcttcttcacattctacacgaatgagtgggagacggaatcacagaggaatgtttgttttcttaagacatctaaaagtggaagaccaagtccccctattattcaagaaaatgctgtatctggatacagtctcttcacctgcagaaaagctcgccctgaaccctgccatttcaagatttactctggagttgccttcgaaggggaagaactgaacgcgaccttcgtgcagggagcagatgcgtgccaagagacctgtacaaagaccatccgctgtcagttttttacttactcattgcttccccaagactgcaaggcagaggggtgtaaatgttccttaaggttatccacggatggctctccaactaggatcacctatgaggcacaggggagctctggttattctctgagactgtgtaaagttgtggagagctctgactgtacgacaaaaataaatgcacgtattgtgggaggaacaaactcttctttaggagagtggccatggcaggtcagcctgcaagtgaagttggtttctcagaaccatatgtgtggagggtccatcattggacgccaatggatactgacggctgcccattgctttgatgggattccctatccagacgtgtggcgtatatatggcgggattcttaatctgtcagagattacaaacaaaacgcctttctcaagtataaaggagcttattattcatcagaaatacaaaatgtcagaaggcagttacgatattgccttaataaagcttcagacaccgttgaattatactgaattccaaaaaccaatatgcctgccttccaaagctgacacaaatacaatttataccaactgctgggtgactggatggggctacacaaaggaacgaggtgagacccaaaatattctacaaaaggcaactattcccttggtaccaaatgaagaatgccagaaaaaatatagagattatgttataaccaagcagatgatctgtgctggctacaaagaaggtggaatagatgcttgtaagggagattccggtggccccttagtttgcaaacatagtggaaggtggcagttggtgggtatcaccagctggggtgaaggctgtgcccgcaaggagcaaccaggagtctacaccaaagttgctgagtacattgactggatattggagaagatacagagcagcaaggaaagagctctggagacatctccagcatgaggaggctgggtactgacggggaagagcccagctggcaccagctttaccacctgccctcaagtcctactagagctccagagttctcttctgcaaaatgtcgatagtggtgtctacctcgcatccttaccataggattaaaagtccaaatgtagacacagttgctaaagacagcgccatgctcaagcgtgcttcctgccttgagcaacaggaacgccaatgagaactatccaaagattaccaagcctgtttggaaataaaatggtcaagggatttttattaggtagtgaaattaggtagttgtccttggaaccattctcatgtaactgttgactctggacctcagcagatcacagttaccttctgtccacttttgacatttgtgtactggaacctgatgctgttcttccacttggagcaaagaactgagaaacctggttctatccattgggaaaaagagatctttgtaacatttcctttacaataaaaagatgttctacttg

SEQ ID NO: 82 - protein, 638 aa, Rattus norvegicus
MILFKQVGYFVSLFATVSCGCLSQLYANTFFRGGDLAAIYTPDAQHCQKMCTFHPRCLLFSFLAVSPTKETDKRFGCFMKESITGTLPRIHRTGAISGHSLKQCGHQLSACHQDIYEGLDMRGSNFNISKTDSIEECQKLCTNNIHCQFFTYATKAFHRPEYRKSCLLKRSSSGTPTSIKPVDNLVSGFSLKSCALSEIGCPMDIFQHFAFADLNVSQVVTPDAFVCRTVCTFHPNCLFFTFYTNEWETESQRNVCFLKTSKSGRPSPPIIQENAVSGYSLFTCRKARPEPCHFKIYSGVAFEGEELNATFVQGADACQETCTKTIRCQFFTYSLLPQDCKAEGCKCSLRLSTDGSPTRITYEAQGSSGYSLRLCKVVESSDCTTKINARIVGGTNSSLGEWPWQVSLQVKLVSQNHMCGGSIIGRQWILTAAHCFDGIPYPDVWRIYGGILNLSEITNKTPFSSIKELIIHQKYKMSEGSYDIALIKLQTPLNYTEFQKPICLPSKADTNTIYTNCWVTGWGYTKERGETQNILQKATIPLVPNEECQKKYRDYVITKQMICAGYKEGGIDACKGDSGGPLVCKHSGRWQLVGITSWGEGCARKEQPGVYTKVAEYIDWILEKIQSSKERALETSPA

SEQ ID NO: 83 - DNA, 1490 bp, Rattus norvegicus
  CDS (74)..(1132)
tctagctctccaagctgattatctgggctgcccctgacatttgtccatctcccagggcctctctggagcagccatgaagtccctggtcctgctcctttgttttgctcagctctggagctgccaatcagctccacaaggtgcagggctgggttttcgagaattggcttgtgatgacccggaaacagagcatgtagctttgatagccgtgcactacctcaataaacatcttcttcagggattcaggcagatcttgaatcagattgacaaagtcaaggtgtggtctcggcggcccttcggacaggtgtatgagttggaaattgacacgctggagacaacctgccacgctctggacccaacccccttagcaaattgttctgtgaggcaacaggccgagcatgcggtggagggagactgtgacttccacatcctgaaacaagatggccagttcagggtgctacacgcccagtgtcattccacaccagactctgcagaggacgttcggaagttttgcccacgatgcccaatcctgatccggttcaatgacaccaacgtggtccacactgtcaaaactgccctggctgccttcaatgcacagaataatggaacctattttaaactggtggagatttcccgagctcaaaatgtgcctttcccggtgtctactctcgtggagtttgtgatagctgcgactgactgtactggtcaggaggtcacagatccagccaaatgcaacctgctggcagaaaagcaatatggcttctgcaaggcgactctcatccacagacttggtggggaagaggtttcagtggcctgcaagttattccagacacagccccagccagccaatgccaaccctgcaggtcctgcacccacagtgggccaagctgcgcctgtagccccaccagctggcccacctgaatccgtggtggtaggacccgtggcagttcctctaggacttccagaccaccgaacccaccatgacctacggcatgccttctctcctgtggcttctgtggagtcggcctcaggagaagttcttcactcacctaaggtgggccagcctggtgacgctggtgctgctggcccagtggcccccctgtgcccagggagagtcagatacttcaagatctaggcttgactcagggaagtaaggttttggcaggcaggacatagccaccactgaagtagagggcttgtccactgaccaagcaagtaccacatcatagcttgaattcaggtctcttcattccccagagaaaaggggcagagaggtgatggttaaatttgttgaaagccagcagcagcaacactagcacttgtggggtgacagactactgtcatttgtttctttgccttctcactgacctcatacaaagcagttgcaagcgcgactgtgaaaggtgctctcaccaaacttcaatctacccataaataaaagtacccgaaggagctttcttaaacaagaaggttctgagccgagtgtggttgtg

SEQ ID NO: 84 - protein, 352 aa, Rattus norvegicus
MKSLVLLLCFAQLWSCQSAPQGAGLGFRELACDDPETEHVALIAVHYLNKHLLQGFRQILNQIDKVKVWSRRPFGQVYELEIDTLETTCHALDPTPLANCSVRQQAEHAVEGDCDFHILKQDGQFRVLHAQCHSTPDSAEDVRKFCPRCPILIRFNDTNVVHTVKTALAAFNAQNNGTYFKLVEISRAQNVPFPVSTLVEFVIAATDCTGQEVTDPAKCNLLAEKQYGFCKATLIHRLGGEEVSVACKLFQTQPQPANANPAGPAPTVGQAAPVAPPAGPPESVVVGPVAVPLGLPDHRTHHDLRHAFSPVASVESASGEVLHSPKVGQPGDAGAAGPVAPLCPGRVRYFKI

SEQ ID NO: 85 - DNA, 1456 bp, Rattus norvegicus
  CDS (32)..(1090)
gtccatctcccagggcctctctggagcagccatgaagtccctggtcctgctcctttgttttgctcagctctggagctgccaatcagctccacaaggtgcagggctgggttttcgagaattggcttgtgatgacccggaaacagagcatgtagctttgatagccgtggactacctcaataaacatcttcttcagggattcaggcagatcttgaatcagattgacaaagtcaaggtgtggtctcggcggcccttcggagaggtgtatgagttggaaattgacacgctggagacaacctgccacgctctggacccaacccccttagcaaattgttctgtgaggcaacaggccgagcatgcggtggagggagactgtgacttccacatcctgaaacaagatggccagttcagggtgctacacgcccagtgtcattccacaccagactctgcagaggacgttcggaagttttgcccacgatgcccaatcctgatccggttcaatgacaccaacgtggtccacactgtcaaaactgccctggctgccttcaatgcacagaataatggaacctattttaaactggtggagatttcccgagctcaaaatgtgcctttcccggtgtctactctcgtggagtttgtgatagctgcgactgactgtactggtcaggaggtcacagatccagccaaatgcaacctgctggcagaaaagcaatatggcttctgcaaggcgactctcatccacagacttggtggggaagaggtttcagtggcctgcaagttattccagacacagccccagccagccaatgccaaccctgcaggtcctgcacccacagtgggccaagctgcgcctgtagccccaccagctggcccacctgaatccgtggtggtaggacccgtggcagttcctctaggacttccagaccaccgaacccaccatgacctacggcatgccttctctcctgtggcttctgtggagtcggcctcaggagaagttcttcactcacctaaggtgggccagcctggtgacgctggtgctgctggcccagtggcccccctgtgcccagggagagtcagatacttcaagatctaggcttgactcagggaagtaaggttttggcaggcaggacatagccaccactgaagtagagggcttgtccactgaccaagcaagtaccacatcatagcttgaattcaggtctcttcattccccagagaaaaggggcagagaggtgatggttaaatttgttgaaagccagcagcagcaacactagcacttgtggggtgacagactactgtcatttgtttctttgccttctcactgacctcatacaaagcagttgcaagcgcgactgtgaaaggtgctctcaccaaacttcaatctacccataaataaaagtacccgaaggagctttcttaaacaagaaggttctgagccgagtgtggttgtgaaaaaaaa

SEQ ID NO: 86 - protein, 352 aa, Rattus norvegicus
MKSLVLLLCFAQLWSCQSAPQGAGLGFRELACDDPETEHVALIAVDYLNKHLLQGFRQILNQIDKVKVWSRRPFGEVYELEIDTLETTCHALDPTPLANCSVRQQAEHAVEGDCDFHILKQDGQFRVLHAQCHSTPDSAEDVRKFCPRCPILIRFNDTNVVHTVKTALAAFNAQNNGTYFKLVEISRAQNVPFPVSTLVEFVIAATDCTGQEVTDPAKCNLLAEKQYGFCKATLIHRLGGEEVSVACKLFQTQPQPANANPAGPAPTVGQAAPVAPPAGPPESVVVGPVAVPLGLPDHRTHHDLRHAFSPVASVESASGEVLHSPKVGQPGDAGAAGPVAPLCPGRVRYFKI

SEQ ID NO: 87 - DNA, 4100 bp, Rattus norvegicus
  CDS (1244)..(1366)
  CDS (1454)..(1693)
  CDS (2158)..(2596)
  CDS (2685)..(2866)
  CDS (2991)..(3131)
  misc_feature (3859)..(3859): N
acctcttcctcaactcacttctctctactctcacttttttttttcttcttcttttttttttttttttttttttttttttttgcaaaagaagggggtaaaaaaatgctgcactgtcgggcgaggccggtgagtgagcgagccggagccaatcagcgcccgccgttccgaaattgccttttatggctcgagtggccgctgtggcgtcctataaaacccggcggcgcaacgcgcgccactgtcgagtccgcgtccacccgcgagtacaacctccttgcagctcctccgtcccggtccacacccgccaccaggtaagcagggacgtcgggcccagcgggccccaactttaccttggccactacctcgctgcaggatcgtgaggaacactcagaagggacaccgtagaggggtggagcgtggtaccgggccgcggagcagctggcaaagcttaactttcccggcccctagggtgtagagtgtttgcagtcgtattcccgcggtgtggacactcgtgggtacgctcctgcttggtgcgcggggcttggggacacactagagtcgcggtgtgggcatttggagagccggtgcggctgcgggtgttaagccgcatctgtccaccttgaggggcaacagtattggggtcaggcgttacaatcacgctttgatggcctatgggtctttgtccaaaccggttttgccattcggcttggcgggcgcggcggggccgctcggccgggtgggggctgggatgccattgcgcgtgcgcgctctatcactgggcattggggccgtgcgcgctggggagggaactcttcctctccccctcttccgagttaagagttgcgcgtgcgtattgagactaggagcgcggccgccccgggttgggcgagggcgggccgtccaccggaaggggcggggtcgtagcggctaggcgcctgctcgcgcttcctgctgggtgtggtcgcctcccgcgcgcgcactagccgcccgtcgcctcagtgtaggcgggcctgtgcccgtttggggaggggcggaggcctggcttcctgccgtgggtccgcctccgggccagcgtttgccttttatggtaataatgcggctgtcctgcgcttcctttgtcccctgagcttgggcgcgcccctggcggctcgaggccgcggctcgccggaagtgggcagggcggcagcggctgctcttggcggctccgcggtgaccatagccctcttttgtgccttgatagttcgccatggatgacgatatcgctgcgctcgtcgtcgacaacggctccggcatgtgcaaggccggcttcgcgggcgacgatgctccccgggccgtcttcccctccatcgtgggccgccctaggcaccaggtaagtgaccctttactttgggagtggcagccctagggttttcttgggggtcgatgccagtgctgagaacgttgttctcctccgcagggtgtgatggtgggtatgggtcagaaggactcctacgtgggcgacgaggcccagagcaagagaggcatcctgaccctgaagtaccccattgaacacggcattgtaaccaactgggacgatatggagaagatttggcaccacactttctacaatgagctgcgtgtggcccctgaggagcaccctgtgctgctcaccgaggcccctctgaaccctaaggccaaccgtgaaaagatgacccaggtcagtatcctgggtgaccctccccttcttattgggtcaacttctcagcacgcccttctctaattgtctttcttctgccatgtcccataggactctcttctatgagctgagtctcccttggaactttgcagtttctgctctttcccagatgaggtcttttttttctctcgatcgcctttctgactaggtgttttaaacccctacagtgctgtgggtgtaggtactaacaatggctcgtgtgacaaagctaatgaggctggtgataaatggccttggagtgtgtattcagtagatgacagtaggtctaaatggagcccctgtcctgatactcccagcacacttaacttagctgtgttcttgccctctttgcatgtctcactcaaatctatccttacagtctcacctgccctgagtgtttcttgtggctttaggagcttgacaatactgtattcctttctctacagatcatgtttgagaccttcaacaccccagccatgtacgtagccatccaggctgtgttgtccctgtatgcctctggtcgtaccactggcattgtgatggactccggagacggggtcacccacactgtgcccatctatgagggttacgcgctccctcatgccatcctgcgtctggacctggctggccgggacctgacagactacctcatgaagatcctgaccgagcgtggctacagcttcaccaccacagctgagagggaaatcgtgcgtgacattaaagagaagctgtgctatgttgccctagacttcgagcaagagatggccactgccgcatcctcttcctccctggagaagagctatgagctgcctgacggtcaggtcatcactatcggcaatgagcggttccgatgccccgaggctctcttccagccttccttcctgggtaagttgtagtctcgtcccttctccatctaaaggtgaccaatgctggaggccacactgtaactctgatctcttgcttttcctttcaggtatggaatcctgtggcatccatgaaactacattcaattccatcatgaagtgtgacgttgacatccgtaaagacctctatgccaacacagtgctgtctggtggcaccaccatgtacccaggcatcgctgacaggatgcagaaggagattactgccctggctcctagcaccatgaagatcaaggtaagcagccttagcctggacccatagtggggtgtggtcagccctgtagttgtagccaactctcttggcttaaggaacaacccagcatccagaatgctcacaatcactgtcttgctttcttcagatcattgctcctcctgagcgcaagtactctgtgtggattggtggctctatcctggcctcactgtccaccttccagcagatgtggatcagcaagcaggagtacgatgagtccggcccctccatcgtgcaccgcaaatgcttctaggcggactgttactgagctgcgttttacaccctttctttgacaaaacctaacttgcgcagaaaaaaaaaatgagacatttggcatggctttattgtttttttgttttttgtttttgttttttttaaattttttttttaaaaaggttttttttttttgttttgttttggcgcttttgactcaaggatttaaaaactggaacggtgaaggcgaccgcagttggttggagcaaacatcccccaaagttctacaatgtggctgaggactttgattgtacattgttttttgtttttggtttttttaatagtcactccaagtatccacggcatagatggttacaggaagtccctcaccctcccaaaagccacccccaactcctaaggggaggatggctgcatccatgccctgagtccacaccgggaaggtgacagcattgcttctgtgtaaattatgtacttgcaaacatttttttaaatcttccgccttaatacttcatttttgtttttaatttctgaatggtcagccattcgtggcctgccccttttttttgtccccccaacttgatgtatgaaggctttggtctccctgggagtggtttgaggtgttgaggcgccagggctggcctgtacactgacgtgagaccgttttaataaaagtgcacaccttacaaacaagtttgtggctctgtggcttctactgggtgtggggagcaggctgggtgggtgtgnaactccacgtgggggaggggcaatttagggtgggctggccttgcctgatagctagtgggagggctaaaggatcatgatctttaatgaggtctcataaataccccaccttcggtcttgagggagggtgaggagttgggaaggtatctccctgacacctggccaagctggcctcatcaaccctactttcctcagccagggggaggtccacatcctcccacctgcatagcttgcgtctagaggc

SEQ ID NO: 88 - protein, 375 aa, Rattus norvegicus
MDDDIAALVVDNGSGMCKAGFAGDDAPRAVFPSIVGRPRHQGVMVGMGQKDSYVGDEAQSKRGILTLKYPIEHGIVTNWDDMEKIWHHTFYNELRVAPEEHPVLLTEAPLNPKANREKMTQIMFETFNTPAMYVAIQAVLSLYASGRTTGIVMDSGDGVTHTVPIYEGYALPHAILRLDLAGRDLTDYLMKILTERGYSFTTTAEREIVRDIKEKLCYVALDFEQEMATAASSSSLEKSYELPDGQVITIGNERFRCPEALFQPSFLGMESCGIHETTFNSIMKCDVDIRKDLYANTVLSGGTTMYPGIADRMQKEITALAPSTMKIKIIAPPERKYSVWIGGSILASLSTFQQMWISKQEYDESGPSIVHRKCF

SEQ ID NO: 89 - DNA, 2528 bp, Mus musculus
  CDS (1)..(1752)
ggagacccgggtgaagctggaccacagggtgaccaaggaagagaggggcccgtcggcatccctggagactcgggtgaggctggccccattggacctaaaggataccgaggtgatgagggtcctccaggtcctgagggcctcagaggagccccaggacctgttggtcctcctggagaccccggacttatgggtgagagaggtgaggatggaccaccaggaaacggcacggaaggtttccccggcttccctgggtatccaggcaacagaggccctcctgggctaaatggcacaaaaggctaccctggcctcaagggggatgagggtgaagtgggagacccaggagaggataacaacgacatttcaccccgtggggtcaaaggggcaaagggataccgaggcccagaaggaccccagggacctccaggacatgtgggaccacctgggccagatgagtgtgagatcctggatatcatcatgaaaatgtgctcctgctgtgagtgcacatgtggacccattgacatcctcttcgtgctggacagctcggagagcattggcctacagaactttgagattgccaaggacttcatcatcaaggtcattgaccggttgagtaaggacgagctggtcaaatttgagccagggcagtctcacgcgggcgtggtacagtacagccacaaccagatgcaagagcacgtgacactgcggagccccaacgtccgcaacgcccaggacttcaaagaagctgtcaagaagctacaatggatggctggtggcacattcaccggagaagcgctgcagtacgcccgggaccggctactcccacccacacagaacaaccgaattgccctggtcattacggatggacgttctgacactcaacgggacacgacacctctcagtgtgctctgtggtgcagacattcaggtagtttctgtgggaatcaaggatgtgtttggctttgtggcgggctccgaccagctcaatgtcatttcctgccaaggcttatcgcaaggtcggccaggtatctccctggtgaaggagaactatgcagagcttctcgatgacggctttctgaagaacataacagcccagatctgtatagataagaagtgtccggattatacctgtccaatcacattctcctccccggctgacatcaccatcctgctagacagctcagccagtgtcggcagccacaacttcgaaaccaccaaggtcttcgccaagcgcctagctgagcgattcctgtcagcaggcagggcggatccttcccaggatgtgcgggtggccgtggtacagtatagtggccaggggcagcaacagccaggtcgggcggctcttcagttcttacagaattacacagtgctggccagctctgtggacagcatggatttcatcaacgacgccacagacgtcaacgatgctctgagctacgtgactcgtttctaccgggaagcctcgtcaggtgccaccaagaagagagtgctgttgttttcagacggctctcagggggccacagcagaggccattgagaaggctgtgcaggaggcccgacgtgcaggcattgagatctttgtggtggtggtgggaccccaggtgaacgagccccacatccgtgtgcttgtcactggcaagactgcagagtacgacgtggcctttggcgagcgccacctattccgtgtaccaaactaccaggccctgctacgtggcgtactctaccagacagtctccaggaaggtggcactgggctagagggcacacacgtggctggacacacatggcatggagacacatttcaacaggccttcccgcccttcccactgacaaaacaggaataggaaatgtgacccaactggtcaactcaactgtcttaaagggaacgctgagatgcacactctttgctttgtgtaatgtcccctgtggctcacctgagctcctatctagatcccgcccttgtttgtacatcatggtggccatcttgctgacccctccccatctgggctggatccagccatcccgtcttcctcctcactgcccctaacctatccgtggtgtcttcacaccatcactgcagtttccgtctgtgtcctgtcttccatgctcaacatgaagcagaccttcttatgagttcagcttgctggattatggcttttaggaaattgacacaggaggagttccaaacacaaacttggaggagacccctcctcttcatcaggtgcttgtcagtgacctacatgcatcttggtctggtccttagtggctagtccttccactctgaaagcaaaggtgctatctatctgtaagggctctctctacacacccagaggcttagcttggacagttcacactcaagtgtcctgtcagaatcaatccagagctttctccctcaaaatagtgacttgtctccccctggtccccaaaggctcccctttagttagtttcttcatggctcccccacattccccgtaatctgatccaagccagctatctctgctaataaaggtttccatttttcaaaaaaaaaaaaa

SEQ ID NO: 90 - protein, 583 aa, Mus musculus
GDPGEAGPQGDQGREGPVGIPGDSGEAGPIGPKGYRGDEGPPGPEGLRGAPGPVGPPGDPGLMGERGEDGPPGNGTEGFPGFPGYPGNRGPPGLNGTKGYPGLKGDEGEVGDPGEDNNDISPRGVKGAKGYRGPEGPQGPPGHVGPPGPDECEILDIIMKMCSCCECTCGPIDILFVLDSSESIGLQNFEIAKDFIIKVIDRLSKDELVKFEPGQSHAGVVQYSHNQMQEHVTLRSPNVRNAQDFKEAVKKLQWMAGGTFTGEALQYARDRLLPPTQNNRIALVITDGRSDTQRDTTPLSVLCGADIQVVSVGIKDVFGFVAGSDQLNVISCQGLSQGRPGISLVKENYAELLDDGFLKNITAQICIDKKCPDYTCPITFSSPADITILLDSSASVGSHNFETTKVFAKRLAERFLSAGRADPSQDVRVAVVQYSGQGQQQPGRAALQFLQNYTVLASSVDSMDFINDATDVNDALSYVTRFYREASSGATKKRVLLFSDGSQGATAEAIEKAVQEARRAGIEIFVVVVGPQVNEPHIRVLVTGKTAEYDVAFGERHLFRVPNYQALLRGVLYQTVSRKVALG

SEQ ID NO: 91 - DNA, 3991 bp, Mus musculus
  CDS (132)..(3209)
ccctccctggctctctcctcagctctgggctctgactgcagcaagcagagacaacctctcactctgcctttcccagcgcccaccctgaccctggcccacatttgacggtgactcgcaggccagccagaaacatgaggctggcccacgctctgctgcccctgctgctacaagcctgctgggtggccacacaggacatccagggctccaaagcgattgccttccaagactgccctgtggatctattcttcgtgctcgacacctcggagagtgtggccttgaggctgaaaccttatggggccttggtggacaaggtgaagtccttcactaagcgcttcattgacaacctgagagacaggtactaccggtgtgaccgcaacctggtttggaatgcgggtgcgctgcactacagtgacgaggtggagatcatccgagggctcacgcgcatgcccagtggccgcgatgagctcaaggccagcgtggatgcggtcaagtacttcgggaaaggcacctacaccgactgcgccattaagaaggggctggaggagctgctcatagggggctcccacctgaaggagaacaagtacttgatcgtggtgaccgacgggcatcctctagagggctacaaggaaccatgcgggggtctggaagatgcagtaaatgaggccaaacacctgggcatcaaggtcttttctgtggccatcacacctgaccacctggagccacgtctaagtatcattgccacagaccacacataccggcgcaatttcacggcagctgactgggggcatagccgcgatgcagaagaggtcatcagccagaccattgacaccattgtggacatgattaaaaataacgtggaacaagtgtgttgttcttttgagtgccaggctgccagaggacctccagggccccgaggcgaccctgggtatgagggggagcgaggaaagccaggtcttccgggagagaagggagaagctggagaccctggacgacctggggatcttggaccagtcgggtaccagggtatgaagggagaaaaggggagccgtggagagaagggttccagaggaccgaaaggttacaagggcgagaaaggcaagcgcggaatcgacggggtcgacggcatgaagggagagacggggtacccaggactaccgggctgcaagggctccccaggatttgatggcattcaaggacccccgggtcccaagggtgatgctggtgcctttgggatgaagggagaaaagggtgaagctggagcagacggtgaggctgggagaccagggaactcagggtcacctggagatgagggtgatcctggagagcctggtccccccggagaaaaaggagaggccggtgatgaaggaaatgctggcccagacggtgcccctggagagaggggtggccctggtgaaagaggacctcgggggacccctggtgtgagaggaccaaggggagacccgggtgaagctggaccacagggtgaccaaggaagagaggggcccgtcggcatccctggagactcgggtgaggctggccccattggacctaaaggataccgaggtgatgagggtcctccaggtcctgagggcctcagaggagccccaggacctgttggtcctcctggagaccccggactgatgggtgagagaggtgaggatggaccaccaggaaacggcacggaaggtttccccggcttccctgggtatccaggcaacagaggccctcctgggctaaatggcacaaaaggctaccctggcctcaagggggatgagggtgaagtgggagacccaggagaggataacaacgacatttcaccccgtggggtcaaaggggcaaagggataccgaggcccagaaggaccccagggacctccaggacatgtgggaccacctgggccagatgagtgtgagatcctggatatcatcatgaaaatgtgctcctgctgtgagtgcacatgtggacccattgacatcctcttcgtgctggacagctcggagagcattggcctacagaactttgagattgccaaggacttcatcatcaaggtcattgaccggttgagcaaggatgagctggtcaaatttgagccagggcagtctcacgcgggcgtggtacagtacagccacaaccagatgcaagagcacgtggacatgcggagccccaacgtccgcaacgcccaggacttcaaagaagctgtcaagaagctacaatggatggctggtggcacattcaccggagaagcgctgcagtacacccgggaccggctactcccacccacacagaacaaccgaattgccctggtcattacggatggacgttctgacactcaacgggacacgacacctctcagtgtgctctgtggtgcagacattcaggtagtttctgtgggaatcaaggatgtgtttggctttgtggcgggctccgaccagctcaatgtcatttcctgccaaggcttatcgcaaggtcgtccaggtatctccctggtgaaggagaactatgcagagcttctcgatgacggctttctgaagaacataacagcccagatctgtatagataagaagtgtccggattatacctgtccaatcacattctcctccccggctgacatcaccatcctgctagacagctcagccagtgtcggcagccacaacttcgaaaccaccaaggtcttcgccaagcgcctagctgagcgattcctgtcagcaggcagggcggatccttcccaggatgtgcgggtggccgtggtacagtatagtggccaggggcagcaacagccaggtcgggcggctcttcagttcttacagaattacacagtgctggccagctctgtggacagcatggatttcatcaacgacgccacagacgtcaacgatgctctgagctacgtgactcgtttctaccgggaagcctcgtcaggtgccaccaagaagagagtgctgttgttttcagacggcaactctcagggggccacagcagaggccattgagaaggctgtgcaggaggcccagcgtgcaggcattgagatctttgtggtggtggtgggaccccaggtgaacgagccccacatccgtgtgcttgtcactggcaagactgcagagtacgacgtggcctttggcgagcgccacctattccgtgtaccaaactaccaggccctgctacgtggcgtactctaccagacagtctccaggaaggtggcactgggctagagggccacacacgtggctggacacacatggcatggagacacatttcaacaggccttcccgcccttcccactgacaaaacaggaataggaaatgtgacccaactggtcaactcaactgtcttaaagggaacgctgagatgcacactctttgctttgtgtaatgtcccctgtggctcacctgagctcctatctagatcccgcccttggtttgtacatcatggtggccatcttgctgacccctcccccatctgggactggatccagccatctcgtcttcctcctcactgcccctaacctatccgtggtgtcttcacaccatcactgcagtttccgtctgtgttctgtcttccatgctcaacatgaagcagaccttctcatgagttcagcttgctggattatggcttttaggaaattgaacacaggaggagttccaaacacaaacttggaggagacccctcctcttcatcaggtgcttgtcagtgacctacatgcatcttggtctggtccttagtggctagtccttccactctgaaagcaaaggtgctatctatctgtaagggctctctctacacacccagaggcttagcttggacagttcacactcaagtgtcctgtcagaatcaatccagagctttctccctcaaaatagtgacttgtctccccctggtccccaaaggctcccctttagttagtttcttcatggctcccccacattccccgtaatctgatccaagccagctatctctgctaataaaggtttccatttttcaaaaaaaaaaaaaa

SEQ ID NO: 92 - protein, 1025 aa, Mus musculus
MRLAHALLPLLLQACWVATQDIQGSKAIAFQDCPVDLFFVLDTSESVALRLKPYGALVDKVKSFTKRFIDNLRDRYYRCDRNLVWNAGALHYSDEVEIIRGLTRMPSGRDELKASVDAVKYFGKGTYTDCAIKKGLEELLIGGSHLKENKYLIVVTDGHPLEGYKEPCGGLEDAVNEAKHLGIKVFSVAITPDHLEPRLSIIATDHTYRRNFTAADWGHSRDAEEVISQTIDTIVDMIKNNVEQVCCSFECQAARGPPGPRGDPGYEGERGKPGLPGEKGEAGDPGRPGDLGPVGYQGMKGEKGSRGEKGSRGPKGYKGEKGKRGIDGVDGMKGETGYPGLPGCKGSPGFDGIQGPPGPKGDAGAFGMKGEKGEAGADGEAGRPGNSGSPGDEGDPGEPGPPGEKGEAGDEGNAGPDGAPGERGGPGERGPRGTPGVRGPRGDPGEAGPQGDQGREGPVGIPGDSGEAGPIGPKGYRGDEGPPGPEGLRGAPGPVGPPGDPGLMGERGEDGPPGNGTEGFPGFPGYPGNRGPPGLNGTKGYPGLKGDEGEVGDPGEDNNDISPRGVKGAKGYRGPEGPQGPPGHVGPPGPDECEILDIIMKMCSCCECTCGPIDILFVLDSSESIGLQNFEIAKDFIIKVIDRLSKDELVKFEPGQSHAGVVQYSHNQMQEHVDMRSPNVRNAQDFKEAVKKLQWMAGGTFTGEALQYTRDRLLPPTQNNRIALVITDGRSDTQRDTTPLSVLCGADIQVVSVGIKDVFGFVAGSDQLNVISCQGLSQGRPGISLVKENYAELLDDGFLKNITAQICIDKKCPDYTCPITFSSPADITILLDSSASVGSHNFETTKVFAKRLAERFLSAGRADPSQDVRVAVVQYSGQGQQQPGRAALQFLQNYTVLASSVDSMDFINDATDVNDALSYVTRFYREASSGATKKRVLLFSDGNSQGATAEAIEKAVQEAQRAGIEIFVVVVGPQVNEPHIRVLVTGKTAEYDVAFGERHLFRVPNYQALLRGVLYQTVSRKVALG

SEQ ID NO: 93 - DNA, 2877 bp, Mus musculus
  misc_feature (1667)..(1672): N
ttcttcctgagggacttttctaccaaaaggcagattatcgatgccatcaacaaagtcgtctataaaggagggaggcatgccaacaccagggtgggcatcgagcacctgctgcggaatcactttgtgccggaggctggtagccgcctggatgagcgggttcctcagatcgccttcgtgatcaccggagggaagtcagtggaggatgctcaggatgtgagcctggctctcacccagaaaggtgtcaaggtgtttgccgttggcgtgaggaacatcgactctgaggaggtgggcaagatagcctccaacagtgccacagccttccgggtgggcagcgtgcaggaactgtccgaactgagtgagacagtgctcgagactctgcatgatgcaatgcatgagaccctctgccctggtgtgaccgatgtctccaaagcctgcaatctggaagtcattctggggtttgatggatctcgagatcagaatgtgtttgtgagtcagaagggccttgagtccaaggtggacatcatcttgaacagaatcagccagatacaaaggatcagctgcagtggcaaccagctgcccactgtgagggtatccgtgatggcgaacacgccctctgggccagtggaggcctttgactttgccgagtatcagccggagctgtttgagaagtttcgcaacatgcgcagtcagcgcccatacgtcctcacagctgacacgctgaagttgtaccagaacaagttcaggcagtcgtcgcctgatactgtgaaggtagtcattcacttcacggatggagcagatggagacatggctgacttatacagagcatctgaggaactccggcaagcaggtgcccaagccctgatcctggtgggtcttgaacgtgtggctaacctggagcggctgatgcatctggagttcgggcggggcttcatgtatgacaggcccctgaggctcaaccagcttgacttagactatgaactggcagagcagcttgacaatattgctgagaaagcttgctgtggggttccatgcaagtgctctggagagaggggagacagagggcccattggcagcattgggccaaagggtatctccggggaagatggctaccgaggctacccgggagacgaaggcgaccctggtgagcgaggtccacctggtgtgaatggcacacaaggtttccagggctgtccaggccagaggggagtgaagggttctcgaggattcccaggagagaagggtgaattgggagaaatcggcttggatggtctggatggtgaagagggagacaaggggctgcctggttcttctggagaaaaggggagtcctggaagaaggggtgacaaaggacccaaaggagacaaaggcgagagaggagatgtcgggattcgaggtgacccgggtgactcaggacgggacagccagcagagaggacccaaaggagagacgggagacatcggccccatgggtctcccaggcagagatggcatccctggcagcccaggagaccctgggaaggacggtggctctggccgaaggggccctgcaggagctaagggcaacagaggtggtcctggccagccaggcttcgaaggcgagcagggtaccagaggctcacagggcccacctggtcccattggtcccccaggcctgattggggaacaagnnnnnnccggacctcgaggaggcggaggtacggctggggctcctggagaacgtggcagaactggtcctctggggaggaagggtgagccaggagagccagggccgaagggaagcatcgggaaccgtggaccccgaggagagacgggagatgacgggagagatggggttggcagtgaaggacgcagaggcaaaaaaggagaaagaggcttccctgggtatccgggaccaaagggcacccctggtgagccaggggcagatggaccaccaggacccaaaggcatcagaggtcgaaggggaaattcaggacctccaggggcaactggacaaaagggagaccctggttacccaggaccatctggtcacaagggcaaccgaggcgactccgttgatcaatgcgccctcatccagagcatcagagacaaatgcccttgctgctacgggcccctggagtgccctgtactcccaacagaactcgcctttgccctggatacctctgagggggtgactcaggacaccttcagccggatgcgagaggtgcttctgggcattgtgggcgatctgaccattgcagagagcaactgtccgcggggtgcccgcgtggctgtggtcacctataacaatgaggtgactacagagatccggtttgctagctccaagaagaagtctgccctcttagacagtattcagaacctccaagtggccttgacctctaagcagcagagcctggagaccgcaatgtcattcgtggccaggaatacattcaaacgtgtgaggagtggcttcccgatgaggaaagtggctgttttcttcagcaacaagcccaccagggcatccccccagctccgagaggccgtactcaagctttccgatgcggggatcacacccttgttccttacaagccaggaggaccgacagctcatcaacgctttgcagatcaataacacagcagtgggacatgccctggtcctgcctgcaaggagggatctcacagacttcctgaagaatgtccttacctgccatgtttgcttggacatttgcaatatcgacccatcctgtggcttcggcagctggaggccttccttcagggaccggagggcagcaggcagtgatgtggacatagacctggctttcatcttggacagctcagaggctaccacactgttccagttcaatgagatgaagaaatacataggctatgtgatcagacagctg

SEQ ID NO: 94 - DNA, 8775 bp, Mus musculus
  CDS (62)..(8035)
tctaaaggacacgcgtcttcaggtccgctcagggttcacacttggtgcttagacattcaaaatgaggaaacaccggcatctgcccctagtggctgtctttagccttctcttctcaggcattgccatgactcgtgcccaacagcatggagtcatggaagtcaacaagagggacatagtcttcctggtagatggttcctccagcctggggccatccaacttcaatgccatccgagacttcgttaccagagtcatccagaggttggaaattggacaggacctggttcaggtatcagtggctcagtatgcagacactgtcagccctgagttctatttaaattcctataccaacaaaagggatgccgtaactgctgtgcggaagatgagggccctgaatggctcagccctgtacacgggatcttctctggacttcgttcgaaacaacctcttcactagctcagccggccatagggccgctgagggggttcctaagctcctggtgttgatcacaggcggtaagtccctcgatgaagtcagccagcctgcccgggagctgaagagaggcagcatcatggccttggccgttggcagcaaggccgccgatgaggatgagctgaaagagatcgcttttgactcctccctggtcttcattcccgctgagttccgccctgctcccttgcaaaacatgctgcccagcctgatggcacctctcaggactctcactggaaccacagaagggagcaagcgggacattcttttcctctttgacggctcagtcaatgtcttgggtcagttccctgctgtcagagactttctctacagattcattgaggaactcgatgtgaagccggatgggacccgggtagcaatagctcagttcagtgatgacgtcaggctggagtcccgcttcagtgagcaccagacgaaagctgaaatccttaatctcgtgaagaagatgaagctaaaaacaggcaaagccctcaacctgggctacgccctggactacgcgcttaggaacatctttgtgaggtcggctggcagccgcatcgaggataacgtgcagcagttcctggtgctgctggttgctggaaggtcgtcagacgctgtggccgggcctgcaagctccctgaagcagagaggagtggtacctttcatctttcaagccaagaacgccaaccccagcgagctggagcagattgtgctgtcccctgcattcatcctggctgcagagtcactccctaagatcggagacctccaatcacagattgtgagccttctgaaagcagaacagggttcaggtcctgtatcaggtgaaaaggatgtggtgtttctcattgatggctctgagggtgtccgcagtggcttccccctgctaaaggactttgtgcagagggttgtggagagcttggatgtgggtcccgaccgtgtgcgtgtggcactggtgcagtacagtgaccggaccaggccggagttctacctgaattcccacatggaccagcagggtgtcatcagcgccatccgcaggctgacactgctgggcggcacaacccccaacacaggggcggcactggagttcgtgttaaggaacattctgaccagttctactgggagcaggatagcagaaggtgttcctcagctcctgattgtcctcacagcagagccatcaggggatgacgtgcgaggcccttcagtagtcctgaagcagggcggggctgtgcccattggcattggcattgggaatgctgacatctctgaaatgcagaccatctccttcatccctgactttgctgtggccatccccaccttccgggagcttgggacgatacagcgggtcatctctgagagggtgatccagcttaatcgtgaggagctgagctcgttgaaacccattttgacgccctcaacaggtgcaggtgttggcagcaagaaagatgtggtctttctcatcgatggatcccgaaatgctggccctgagttccagtacatccgtacccagattgagaggatagtcgagtacctggacataggctttgacaccacccgggtagccgtcatccagttcagtgaggactccaagatggagtttcctctgaatgcccacttcagcaaggatgaagtacagaacactgtgcgcaggctgcggcccaagggtgggagtcaggtttacatcggaaatgccctggagtacgtgctgaagaacatcttccagaggccactggggagccggatagaagagggcgttccgcagttcctagtcctcatttcgtctggaaagtatgatgatgaggtggacgactcagccgtggaactcaagcagttcggtgtggcccctctcaccatagccagacacacagaccaagaggagctggtgaagatctccctaagtcctgagtacgtgtactccgtgagcaccttcagggagctgcccagactggagcagaagctgctgacgcccatcaccactctaacctcacagcagatccatcagatcctggccagtacccgatatcccccttcagtggttgaaagcgatgcggctgacatcgtctttctgattgacagctctgatgccgtcaagcccgatggcatcgctcatatccgagactttgtcagcaggatcgttcgcagactcaacattggtcccagtaaagtgaggattggggtcgtgcagtttagcaatgatgtcttccctgagttctacctgaagacccacaagtcccagagcagtgtgcttgaagccatacggcgtctgaggttcaaaggagggtctcccctaaacactggcagagccctggagtttgtggcaaggaacctcttcgtgaagtctgctgggagccggatagaagatggggtccctcaacacctggtcttattcctgggtgggaagtctcaggacgatgtggccaggcatgcccaagtcataagctcatcggggattgtgagcttaggaataggagatcggaacattgataggacggacttgcaaaccatcaccaatgaccccaggctggtcttcacagttcgggaattcagagagctgcccaacatagaagagagggtcatgctttcctttggaccctctggggctactcctcagcctcctggggtagatttaccttctccttcccggccagagaagaagaaggccgacattgtgttcctgctggatggttccatcaattttaggagggacagtttccaggaagtgctccgttttgcatctgtaatcgtggacacggtctatgaagacggagattccatcagagtgggactggtccagtacaactcagaccccacggatgaattcttcctgagggacttttctaccaaaaggcagattatcgatgccatcaacaaagtcgtctataaaggagggaggcatgccaacaccagggtgggcatcgagcacctgctgcggaatcactttgtgccggaggctggtagccgcctggatgtgcgggttcctcagatcgccttcgtgatcaccggagggaagtcagtggaggatgctcaggatgtgagcctggctctcacccagaaaggtgtcaaggtgtttgccgttggcgtgaggaacatcgactctgaggaggtgggcaagatagcctccaacagtgccacagccttccgggtgggcagcgtgcaggaactgtccgaactgagtgagacagtgctcgagactctgcatgatgcaatgcatgagaccctctgccctggtgtgaccgatgtctccaaagcctgcaatctggaagtcattctggggtttgatggatctcgagatcagaatgtgtttgtgagtcagaagggccttgagtccaaggtggacatcatcttgaacagaaccagccagatacaaaggatcagctgcagtggcaaccagctgcccactgtgagggtatccgtgatggcgaacacgccctctgggccagtggaggcctttgactttgccgagtatcagccggagctgtttgagaagtttcgcaacatgcgcagtcagcgcccatacgtcctcacagctgacacgctgaagttgtaccagaacaagttcaggcagtcgtcgcctgatactgtgaaggtagtcattcacttcacggatggagcagatggagacatggctgacttatacagagcatctgaggaactccggcaagcaggtgcccaagccctgatcctggtgggtcttgaacgtgtggctaacctggagcggctgatgcatctggagttcgggcggggcttcatgtatgacaggcccctgaggctcaacctgcttgacttagactatgaactggcagagcagcttgacaatattgctgagaaagcttgctgtggggttccatgcaagtgctctggagagaggggagacagagggcccattggcagcattgggccaaagggtatctccggggaagatggctaccgaggctacccgggagacgaaggcgaccctggtgagcgaggtccacctggtgtgaatggcacacaaggtttccagggctgtccaggccagaggggagtgaagggttctcgaggattcccaggagagaagggtgaattgggagaaatcggcttggatggtctggatggtgaagagggagacaaggggctgcctggttcttctggagaaaaggggagtcctggaagaaggggtgacaaaggacccaaaggagacaaaggcgagagaggagatgtcgggattcgaggtgacccgggtgactcaggacgggacagccagcagagaggacccaaaggagagacgggagacatcggccccatgggtctcccaggcagagatggcatccctggcagcccaggagaccctgggaaggacggtggctctggccgaaggggccctgcaggagctaagggcaacagaggtggtcctggccagccaggcttcgaaggcgagcagggtaccagaggctcacagggcccacctggtcccattggtcccccaggcctgattggggaacaaggatttcccggacctcgaggaggcggaggtacggctggggctcctggagaacgtggcagaactggtcctctggggaggaagggtgagccaggagagccagggccgaagggaagcatcgggaaccgtggaccccgaggagagacgggagatgacgggagagatggggttggcagtgaaggacgcagaggcaaaaaaggagaaagaggcttccctgggtatccgggaccaaagggcacccctggtgagccaggggcagatggaccaccaggacccaaaggcatcagaggtcgaaggggaaattcaggacctccaggggcaactggacaaaagggagaccctggttacccaggaccatctggtcacaagggcaaccgaggcgactccgttgatcaatgcgccctcatccagagcatcagagacaaatgcccttgctgctacgggcccctggagtgccctgtactcccaacagaactcgcctttgccctggatacctctgagggggtgactcaggacaccttcagccggatgcgagaggtgcttctgggcattgtgggcgatctgaccattgcagagagcaactgtccgcggggtgcccgcgtggctgtggtcacctataacaatgaggtgactacagagatccggtttgctagctccaagaagaagtctgccctcttagacagtattcagaacctccaagtggccttgacctctaagcagcagagcctggagaccgcaatgtcattcgtggccaggaatacattcaaacgtgtgaggagtggcttcccgatgaggaaagtggctgttttcttcagcaacaagcccaccagggcatccccccagctccgagaggccgtactcaagctttccgatgcggggatcacacccttgttccttacaagccaggaggaccgacagctcatcaacgccttgcagatcaataacacagcagtgggacatgccctggttctgcctgcaaggagggatctcacagacttcctgaagaatgtccttacctgccatgtttgcttggacatttgcaatatcgacccatcctgtggcttcggcagctggaggccttccttcagggaccggagggcagcaggcagtgatgtggacatagacctggctttcatcttggacagctcagaggctaccacactgttccagttcaatgagatgaagaaatacataggctatgtgatcagacagctggacctgagcccagacccgaaggcttcccaacactttgccagggtggctgttgtgcagcagtcaacctacgagtctgtggacaatgccagtgtgccgcctgtgaaggtggaattctcactgacagactatggtgccaaggaaaagctgttggatttccttagccggaggatgacccaacttcagggaaccatgggcctgggcaatgccattgaatacactatagagaacatctttgaaagtgctccaaacccacgggacctcaaaattatggtgctgatgttgactggtgacatgcagaggcagcagctggaggaggcccagagagccatcctccaggccaagtgcaagggttacttccttgtggttctgggcattggcaggaaggtgaatatcaaggaggtctacagctttgccagtgagcccaatgatgtcttcttcaaatttgtggacaaatcaactgagctcaacgaggagcctctgatgcgctttgggaggctgctcccatcctttgtcagcagtgaaaatgcattttacctgcctccagatttcaggaaacagtgtgattggttccaaggggaccaaccagtgaagaatggcgtgaagtttggtcacaaacagataaaccctccacatactgctaattcaagtcttacatccaaagttgtgaccacaataaagccatcgaattcaagcaaaccaacagcaattgtaaacctgacacctgctaagccagccccagcgaggccagcccctgctcagccagttcttgctaagccagaccccgcaaaaccagcccaagcaaggccagcccctgctaagccagcttctgctaagttggtgcctcctcagccagtccatgttcagccagcccctgcccagacagcttctgtaagaccagcccccgctaagccagcccctcctcagccagctgctgctaagccagtccctgctaagccagcagtccccgctcagccagcccctcctcagccagctgctgctaagccagtccctgctaagccagcagtccctgctcagccagccgctgctcaaccaatgcctgctcagccagtccttactaaatcagccgctgtgaaaccagcctctgccaacaagcctgtggctgccaaacctgtggccacgaacacagccacagccacagccagacctgcattagcagcgaagcctgctgcagcgaagcctgcagcaacgagagacccccttgctgctgccgtaaggccagttgctaccaagccagaggcccccaggcaacaggccaaaccagctgccaccaagccagccactactaagcccttggcgagagtgtcccgagaagtccaggtctctgaagtcacggagaacagtgccagactccactgggagcggcccgagccttccagctcctttttttatgacctcactgtaacctcggcccacgaccagtccttggttctgagacaaaacctcactgtcactgaccgtgtcatcggaggcctactggctggacagctgtaccatgtcgtagtggtctcctacctgcagtctcaggtcagggccatctaccaaggaagtttcaatacgaagaaaacccagcctccacctcttcaggcagcacaccgagcatccagttcaaccatcaacctcatggtgaacacagaaccattgtttctcactaaaacagatatatgtaagctgtccagagatgctgggacttgtgtggacttcaagttactatggcactatgacctagagagcaaaagttgcaagagattctggtatggaggttgtggaggcaacgagaacagattccactcccaggaagaatgtgaaaagatgtgtagtcctgagttaacagtttgacaagagcctaagcatggccttcaggcaacacgtacctctgggagaaggaggaggcagccatttctaactcgtttctatagaagccctgggtagatgcctcagcacggtgccttttcatgctttgattgacactcaacctcgggaggaaaccctctgcacgtgacctgtcaatatggtgctaaatgtgtctatggaccctgctctccgtctccaggcagttctaccgtatacttggacccttgggttatagctagccactgctggtgtttatgtgaacattcctataaattcaatttccctctggagttccacgctacgcctgtgccaggcaaaccctgtgcctagaacatagcctggacgtcacagctactctgtacatttctgcttggttcattcctctgtagttgcacggcttagatggagaaacaagagtctaaccttctcatggtcccagttttctggattagacttcgatcaatattcttctaaatcctctgacaaatgatctaattagaagaaatcagacctctttcctgtgtgcattgctgggacaaatgcctccattagaaaattcaaagaaagtcataatcgagaatctctttggtggtcctctaaggcgggttgtttttcaatgttgttgtcttggagcttggaggtgaaattcaatgtttaaaatttttaggaaatttatacaaagaaacttttaaataaagtatattgaatgtgccatgaaaaaaaaa

SEQ ID NO: 95 - protein, 2657 aa, Mus musculus
MRKHRHLPLVAVFSLLFSGIAMTRAQQHGVMEVNKRDIVFLVDGSSSLGPSNFNAIRDFVTRVIQRLEIGQDLVQVSVAQYADTVSPEFYLNSYTNKRDAVTAVRKMRALNGSALYTGSSLDFVRNNLFTSSAGHRAAEGVPKLLVLITGGKSLDEVSQPARELKRGSIMALAVGSKAADEDELKEIAFDSSLVFIPAEFRPAPLQNMLPSLMAPLRTLTGTTEGSKRDILFLFDGSVNVLGQFPAVRDFLYRFIEELDVKPDGTRVAIAQFSDDVRLESRFSEHQTKAEILNLVKKMKLKTGKALNLGYALDYALRNIFVRSAGSRIEDNVQQFLVLLVAGRSSDAVAGPASSLKQRGVVPFIFQAKNANPSELEQIVLSPAFILAAESLPKIGDLQSQIVSLLKAEQGSGPVSGEKDVVFLIDGSEGVRSGFPLLKDFVQRVVESLDVGPDRVRVALVQYSDRTRPEFYLNSHMDQQGVISAIRRLTLLGGTTPNTGAALEFVLRNILTSSTGSRIAEGVPQLLIVLTAEPSGDDVRGPSVVLKQGGAVPIGIGIGNADISEMQTISFIPDFAVAIPTFRELGTIQRVISERVIQLNREELSSLKPILTPSTGAGVGSKKDVVFLIDGSRNAGPEFQYIRTQIERIVEYLDIGFDTTRVAVIQFSEDSKMEFPLNAHFSKDEVQNTVRRLRPKGGSQVYIGNALEYVLKNIFQRPLGSRIEEGVPQFLVLISSGKYDDEVDDSAVELKQFGVAPLTIARHTDQEELVKISLSPEYVYSVSTFRELPRLEQKLLTPITTLTSQQIHQILASTRYPPSVVESDAADIVFLIDSSDAVKPDGIAHIRDFVSRIVRRLNIGPSKVRIGVVQFSNDVFPEFYLKTHKSQSSVLEAIRRLRFKGGSPLNTGRALEFVARNLFVKSAGSRIEDGVPQHLVLFLGGKSQDDVARHAQVISSSGIVSLGIGDRNIDRTDLQTITNDPRLVFTVREFRELPNIEERVMLSFGPSGATPQPPGVDLPSPSRPEKKKADIVFLLDGSINFRRDSFQEVLRFASVIVDTVYEDGDSIRVGLVQYNSDPTDEFFLRDFSTKRQIIDAINKVVYKGGRHANTRVGIEHLLRNHFVPEAGSRLDVRVPQIAFVITGGKSVEDAQDVSLALTQKGVKVFAVGVRNIDSEEVGKIASNSATAFRVGSVQELSELSETVLETLHDAMHETLCPGVTDVSKACNLEVILGFDGSRDQNVFVSQKGLESKVDIILNRTSQIQRISCSGNQLPTVRVSVMANTPSGPVEAFDFAEYQPELFEKFRNMRSQRPYVLTADTLKLYQNKFRQSSPDTVKVVIHFTDGADGDMADLYRASEELRQAGAQALILVGLERVANLERLMHLEFGRGFMYDRPLRLNLLDLDYELAEQLDNIAEKACCGVPCKCSGERGDRGPIGSIGPKGISGEDGYRGYPGDEGDPGERGPPGVNGTQGFQGCPGQRGVKGSRGFPGEKGELGEIGLDGLDGEEGDKGLPGSSGEKGSPGRRGDKGPKGDKGERGDVGIRGDPGDSGRDSQQRGPKGETGDIGPMGLPGRDGIPGSPGDPGKDGGSGRRGPAGAKGNRGGPGQPGFEGEQGTRGSQGPPGPIGPPGLIGEQGFPGPRGGGGTAGAPGERGRTGPLGRKGEPGEPGPKGSIGNRGPRGETGDDGRDGVGSEGRRGKKGERGFPGYPGPKGTPGEPGADGPPGPKGIRGRRGNSGPPGATGQKGDPGYPGPSGHKGNRGDSVDQCALIQSIRDKCPCCYGPLECPVLPTELAFALDTSEGVTQDTFSRMREVLLGIVGDLTIAESNCPRGARVAVVTYNNEVTTEIRFASSKKKSALLDSIQNLQVALTSKQQSLETAMSFVARNTFKRVRSGFPMRKVAVFFSNKPTRASPQLREAVLKLSDAGITPLFLTSQEDRQLINALQINNTAVGHALVLPARRDLTDFLKNVLTCHVCLDICNIDPSCGFGSWRPSFRDRRAAGSDVDIDLAFILDSSEATTLFQFNEMKKYIGYVIRQLDLSPDPKASQHFARVAVVQQSTYESVDNASVPPVKVEFSLTDYGAKEKLLDFLSRRMTQLQGTMGLGNAIEYTIENIFESAPNPRDLKIMVLMLTGDMQRQQLEEAQRAILQAKCKGYFLVVLGIGRKVNIKEVYSFASEPNDVFFKFVDKSTELNEEPLMRFGRLLPSFVSSENAFYLPPDFRKQCDWFQGDQPVKNGVKFGHKQINPPHTANSSLTSKVVTTIKPSNSSKPTAIVNLTPAKPAPARPAPAQPVLAKPDPAKPAQARPAPAKPASAKLVPPQPVHVQPAPAQTASVRPAPAKPAPPQPAAAKPVPAKPAVPAQPAPPQPAAAKPVPAKPAVPAQPAAAQPMPAQPVLTKSAAVKPASANKPVAAKPVATNTATATARPALAAKPAAAKPAATRDPLAAAVRPVATKPEAPRQQAKPAATKPATTKPLARVSREVQVSEVTENSARLHWERPEPSSSFFYDLTVTSAHDQSLVLRQNLTVTDRVIGGLLAGQLYHVVVVSYLQSQVRAIYQGSFNTKKTQPPPLQAAHRASSSTINLMVNTEPLFLTKTDICKLSRDAGTCVDFKLLWHYDLESKSCKRFWYGGCGGNENRFHSQEECEKMCSPELTV

SEQ ID NO: 96 - DNA, 3783 bp, Rattus norvegicus
  CDS (951)..(2876)
cttttttgggtcacaggtcctcctaacatgagaaccgagtgtttacacaatgatgttcttttgaaaaccgtgaaaactccacaggcgatgtacttgtacgttaagcgtgacataaagacagcaaagcgaataaactatactgcaagatctcttctctttccctatttaaacctaaaatggagggagtggggggcagacacagacaggcgagcattccacaggcgccccccccacgctgtcacttccaggcaggacccaatcacagacttcttagccaagagttatacctcccgttttgagaaactttctgcgtccgccatcctgtaggaagaatttgtacaccttaaactccctccctggtctgattcccaatgtctctcaccgcccagcactttcaggagctgacccttctcagcttcacatacagagaccgctaccttgcgtcgccatggcaacactgtcacaaccggaacaagcacttcctaccaccccccgcctcaggaatccaatctgtccagcgaagcccagatccgtctggagagttctggacaagggcggtaccctcaacatggattactcatgggaggcggagaagctctaacagacccgaaactgctggaagattcctggccccaaggcctcctcccgctcgctgattggcccatgggagggtgggcggggccggaggaggctccttaaaggcgcagggcggcgcgcaggacaccagattcctcctcctaatctgacagaaccagtttctggttccactcgcagagaagcagagaagcggagcaagcggcgcgttccagaacctcgggcaagaccagcctctcccagagcatccccaccgcgaagcgcaaccttctccagagcataccccagcggagcgcacccttccccagagcatccccgccgccaagcgcaaccttccagaagcagagagcggcgacatggccaagaaaacagcgatcggcatcgacctgggcaccacctactcgtgcgtgggcgtgttccagcacggcaaggtggagatcatcgccaacgaccagggcaaccgcacgacccccagctacgtggccttcaccgacaccgagcggctcatcggggacgccgccaagaaccaggtggcgctgaacccgcagaacaccgtgttcgacgcgaaacggctgatcggccgcaagttcggcgacccggtggtgcagtcggacatgaagcactggcccttccaggtggtgaacgacggcgacaagcccaaggtgcaggtgaactacaagggcgagaaccggtcgttctacccggaggagatctcgtccatggtgctgaccaagatgaaggagatcgccgaggcgtacctgggccacccggtgaccaacgccgtgatcaccgtgcccgcctacttcaacgactcgcagcggcaggccaccaaggacgcgggcgtgatcgcgggtctgaacgtgctgcggatcatcaacgagcccacggcggccgccatcgcctacgggctggaccggaccggcaagggcgagcgcaacgtgctcatcttcgacctggggggcggcacgttcgacgtgtccatcctgacgatcgacgacggcatcttcgaggtgaaggccacggcgggcgacacgcacctgggtggggaggacttcgacaaccggctggtgagccacttcgtggaggagttcaagaggaagcacaagaaggacatcagccagaacaagcgcgcggtgcggcgactgcgcacggcgtgcgagagggccaagaggacgctgtcgtccagcacccaggccagcctggagatcgactctctgttcgagggcatcgacttctacacgtccatcacgcgggcgcggttcgaggagctgtgctcggacctgttccgcggcacgctggagcccgtggagaaggccctgcgcgacgccaagctggacaaggcgcagatccacgacctggtgctggtgggcggctcgacgcgcatccccaaggtgcagaagctgctgcaggacttcttcaacgggcgcgacctgaacaagagcatcaatccggacgaggcggtggcctacggggcggcggtgcaggcggccatcctgatgggggacaagtcggagaacgtgcaggacctgctgctgctggacgtggcgccgctgtcgctgggtctggagaccgcgggcggcgtgatgacggcgctcatcaagcgcaactccaccatccccaccaagcagacgcagaccttcaccacctactcggacaaccagcccggggtgctgatccaggtgtacgagggcgagagggccatgacgcgcgacaacaacctgctggggcgcttcgagttgagcggcatcccgccggctcccaggggggtgccccagatcgaggtgaccttcgacatcgacgccaacggcatcctgaacgtcacggccactgacaagagcaccggcaaggccaacaagatcaccatcaccaacgacaagggccgcctgagcaaggaggagatcgagcgcatggtgcaggaggccgagcgctacaaggcggaggacgaggtgcagcgcgagagggtggctgccaagaatgcgctcgagtcctatgccttcaacatgaagagcgccgtggaggacgagggtctcaagggcaagatcagcgaggctgacaagaagaaggtgctggacaagtgccaggaggtcatctcctggctggactctaacacgctggctgagaaagaggagttcgtgcacaagcgggaggagctggagcgggtgtgcaacccgatcatcagcgggctgtatcagggtgcgggtgctcccggggctgggggcttcggggcccaggcgcccaagggaggctctgggtcggggcccaccatcgaggaggtggattagaggcttttctggctctcagggtgttggctagagacagactcttgatggctgctggtgcacgattcttatcaagttactccttctctccggagttcagtttaaagttacagccttttatacggtaattgatttgagtttgttacattttgtatgctcgtgggttttttatatattcaaattaaggttgcatgttctttgcgtttaatctaagtagctgtgtaaaaatggtgtttccttcctgcgaacacctcagcactgccaccctgtgtacagttttttccttgcatccctacaaactgagaaaaaaagttatcttttgtaacttaaacattcaaaataaaatgttacaagtatgttttgtccgtgtgtatgttgggagggctaatggattctgggttcatgtggatttcttagctttgcgatgacggggaaatggggtttgggtactttggttagaagtgtgggttttggggttggggattgagctcagtggtagagcgcttgcctaggaagcgcaaggccctgggttcggtccccagctcccaaaaaagaaccaaaaaaaaaaaaagtgtgggttttcagcgcagttatgcagaaaatgcaggtattcggtttgagggtaggactcattggggggaacagtagggtggtgctgtagttgggggtcagtggaagagggactcttagggctatgatgactcagttctcttaccctccagggctgaaccagaactgtttcccaacttatgggtcgagacctctgttggagtcagacgacctttccacagtggtagcctcggacattgaaaattgcaggggttgttggttgtcggttgggtttttgttttgtcttgttttgtttttcaagacagggtctctctgtgtagccctggctgttctcgatttc

SEQ ID NO: 97 - protein, 641 aa, Rattus norvegicus
MAKKTAIGIDLGTTYSCVGVFQHGKVEIIANDQGNRTTPSYVAFTDTERLIGDAAKNQVALNPQNTVFDAKRLIGRKFGDPVVQSDMKHWPFQVVNDGDKPKVQVNYKGENRSFYPEEISSMVLTKMKEIAEAYLGHPVTNAVITVPAYFNDSQRQATKDAGVIAGLNVLRIINEPTAAAIAYGLDRTGKGERNVLIFDLGGGTFDVSILTIDDGIFEVKATAGDTHLGGEDFDNRLVSHFVEEFKRKHKKDISQNKRAVRRLRTACERAKRTLSSSTQASLEIDSLFEGIDFYTSITRARFEELCSDLFRGTLEPVEKALRDAKLDKAQIHDLVLVGGSTRIPKVQKLLQDFFNGRDLNKSINPDEAVAYGAAVQAAILMGDKSENVQDLLLLDVAPLSLGLETAGGVMTALIKRNSTIPTKQTQTFTTYSDNQPGVLIQVYEGERAMTRDNNLLGRFELSGIPPAPRGVPQIEVTFDIDANGILNVTATDKSTGKANKITITNDKGRLSKEEIERMVQEAERYKAEDEVQRERVAAKNALESYAFNMKSAVEDEGLKGKISEADKKKVLDKCQEVISWLDSNTLAEKEEFVHKREELERVCNPIISGLYQGAGAPGAGGFGAQAPKGGSGSGPTIEEVD

SEQ ID NO: 98 - DNA, 1998 bp, Mus musculus
  CDS (35)..(1012)
cccactgccccgcagcctccctttgctcgcgaccatggcgcgcggtggccgcttgggactcgccctggggctgctgctggcgctggtgctggcgctgcgggccaagcccacggtgcgcaaggagcgcgtggttcggccggactcagagctgggcgagcggccgcccgaggacaaccagagcttccagtacgatcatgaggccttcctgggcaaggaggactccaagaccttcgatcagctaagcccggacgagagcaaggagaggctggggaaaattgtggatcgaattgacagtgatggtgatggccttgttactactgaggagctgaaactttggatcaaacgggtacagaaaagatacatctatgataatgtcgctaaagtctggaaggattatgatagggacaaagacgaaaagatctcctgggaagaatacaagcaggccacctatggctactacctgggaaaccccgctgaattccatgatagttctgatcaccacacctttaaaaagatgctgccacgagatgagaggaggtttaaggcttcagaccttgacggcgacctgacagctactcgggaggagttcactgcctttctgcacccagaggagtttgaacatatgaaggagattgtagtcctggaaaccctggaggacatcgacaagaacggggatggttttgtggaccaggatgagtacatcgcggacatgttttcccacgaggacaatggccctgagccagactgggttttgtctgaacgggagcagttcaacgacttccgagatctgaacaaggatgggaagctggacaaggatgagattcgccactggatcctccctcaggactacgaccatgcgcaggccgaggcccggcatctggtgtacgagtcagacaaaaacaaggacgagatgctgaccaaggaggagattctggacaactggaacatgtttgtgggaagccaagctaccaactacggggaagacctgaccaaaaatcatgatgaactttgaaagacactggttctggtgtggccaactgtcgcaggctgtctgcaggtgtagtgggtgattgctatagttgtcaagggtatagcagttgtgtcccttaacagtgggattatacctcagattggggttaaaaattatttttcactccatatttactgggagataaccatcattatttattccagtaggatttcccgtgaagcacattaaactcctggcaaattgcagtcctctgaggggatacattgctacagcatgatttttctagactcctctcccccacttaactcattaatggggaagagaccatgaaagggctctgtaactcaaggtgggtgggtgggacactgtacagagtaaccgctgtgtatttgaactattaaattttggggtttttagttgccactgttaaacggtggtgaaggtaaaggctgaaggaatcaatttgtattgtccttggagcaggcatggtatttcaaatcttctatacttggagctgtcttgtaaatggtatataaacttttgtgcgttttcctgtatagacctgctaatgtgcacaataaacccacatcctggggtttttgttttgtttttaacactaagaagcaatcaaaaaaagataatgtgaacaaaaacggaattttagggataggaaaaagatggatgctaggtatttgaaaaactgtatgaccatggtcaacaccttaatatacttgagaattttttttacatgttaatgaggtgggtctgtttttttaaatagtgaatggaaatgcagtccctccctggctgtgaggctagggatcagatgtagtggatttattatttgttgagtcctgaatctctgagcctgcttctagcacagcttatgccaaggaaacagggcaaggtgaacatctcagccattgaccaaactagctggagtaacacttacaggtgaaattccaccctgtagatgggaggaaagtgaataaaggatgcctttgagg

SEQ ID NO: 99 - protein, 325 aa, Mus musculus
MARGGRLGLALGLLLALVLALRAKPTVRKERVVRPDSELGERPPEDNQSFQYDHEAFLGKEDSKTFDQLSPDESKERLGKIVDRIDSDGDGLVTTEELKLWIKRVQKRYIYDNVAKVWKDYDRDKDEKISWEEYKQATYGYYLGNPAEFHDSSDHHTFKKMLPRDERRFKASDLDGDLTATREEFTAFLHPEEFEHMKEIVVLETLEDIDKNGDGFVDQDEYIADMFSHEDNGPEPDWVLSEREQFNDFRDLNKDGKLDKDEIRHWILPQDYDHAQAEARHLVYESDKNKDEMLTKEEILDNWNMFVGSQATNYGEDLTKNHDEL

SEQ ID NO: 100 - DNA, 1396 bp, Mus musculus
  CDS (232)..(1281)
ggctccctgtctccccacaccttccaggctcctagaggagaaaactgtactggtgttttgatcgtagaagagaccaggcaaagcactttcccattctctcgagggacgaacttgaagcagggagttgcgcccagacttctttaaattcactacgtagccaaaggcgacatcaaacctgtgattctccagcctccatctttcaagtgctaggattacaggtctgcaaacagcatgtacacacccatccctcagagtggctctccattcccggcctcagtccaagacccaggcctacacatatggcgtgtggagaagctgaagccgtggcccatagcacgagagagccatggcatctttttctctggggactcctacctagtgcttcacaatggcccagaggaggcttcccatctgcacctgtggataggccagcagtcctcccgggatgagcagggggcctgtgcagtgctggctgtgcatctcaacaccctgctgggggagcggccagtgcagcaccgtgagttgcaaggcaatgagtctgacctcttcatgagctacttcccacgaggcctcaagtaccgggaaggtggtggtagagtcggcatttcacaagacaaccttcgcgccaccccagcagccatcaggaagctctaccaggttaaggggaagaagaacatccgtgcgaccgagagggctctgagttgggacagcttcaacactggggactgcttcatcctggacctgggtcagaacatctttgcctggtgtggtggaaagtccaacatccttgagcgcaacaaggcgagggacctggccctggccatcagggacagcgagcggcagggcaaggcccaggtggaaatcatcactgatggagaggagccagccgagatgattcaggttctgggccccaagcctgctctgaaggagggtaaccccgaggaagacattacagctgaccagaccaacgcccaggctgcagccctgtataaggtctctgatgccactggacagatgaatctgaccaaggtggctgactccagcccttttgcctctgaactgctaattccagatgactgctttgttctggacaacgggctgtgtggcaaaatctacatctggaaggggagaaaagctaatgagaaagagcggcaggcagccctccaagtggctgatggcttcatctctcgaatgaggtattccccaaacactcaggtggagatactgcgccagggccgagagagtcccatcttcaagcaattcttcaagaactggaagtgagggtggtgtcccccatctctgctctcctgcccccacccctgcctgctgggtcagtactgaggtgccctctggatgcacaataaaggacacattccaaaaaaaaaaaaaaaaaaaa

SEQ ID NO: 101 - protein, 349 aa, Mus musculus
MYTPIPQSGSPFPASVQDPGLHIWRVEKLKPWPIARESHGIFFSGDSYLVLHNGPEEASHLHLWIGQQSSRDEQGACAVLAVHLNTLLGERPVQHRELQGNESDLFMSYFPRGLKYREGGGRVGISQDNLRATPAAIRKLYQVKGKKNIRATERALSWDSFNTGDCFILDLGQNIFAWCGGKSNILERNKARDLALAIRDSERQGKAQVEIITDGEEPAEMIQVLGPKPALKEGNPEEDITADQTNAQAAALYKVSDATGQMNLTKVADSSPFASELLIPDDCFVLDNGLCGKIYIWKGRKANEKERQAALQVADGFISRMRYSPNTQVEILRQGRESPIFKQFFKNWK

SEQ ID NO: 102 - DNA, 1197 bp, Mus musculus
  CDS (32)..(1081)
gaaaaggcccgtggagaggtctgcaaacagcatgtacacacccatccctcagagtggctctccattcccggcctcagtccaagacccaggcctacacatatggcgtgtggagaagctgaagccagtgcccatagcacgagagagccatggcatctttttctctggggactcctacctagtgcttcacaatggcccagaggaggcctcccatctgcacctgtggataggccagcagtcctcccgggatgagcagggggcctgtgcagtgctggctgtgcatctcaacaccctgctgggggagcggccagtgcagcaccgtgaggttcaaggcaatgagtctgacctcttcatgagctacttcccacgaggcctcaagtaccgggaaggtggtgtagagtcggcatttcacaagacaacctcgggcgccaccccagcagccatcaggaagctctaccaggttaaggggaagaagaacatccgtgcgaccgagagggctctgagctgggacagcttcaacactggggactgcttcatcctggacctgggtcagaacatctttgcctggtgtggtggaaagtccaacatcctcgagcgcaacaaggcgagggacctggccctggccatcagggacagcgagcggcagggcaaggcccaggtggaaatcatcactgatggagaggagccagccgagatgattcaggttctgggccccaagcctgctctgaaggagggcaaccccgaggaagacattacagctgaccagaccaacgcccaggccgcagccctgtataaggtctctgatgccactggacagatgaatctgaccaaggtggctgactccagcccttttgcctctgaactgctaattccagatgactgctttgttctggacaatgggctgtgtggcaaaatctacatctggaaggggagaaaagctaatgagaaagagcggcaggcagccctccaagtggctgatggcttcatctctcgaatgaggtattccccaaacactcaggtggagatactgccccagggccgagagagtcccatcttcaagcaattcttcaagaactggaagtgagggtgggtgtcccccatctctgctctcctgcctcccacccctgcctgctgggtcagcactgaggtgccctctggatgctcaataaaggacacattccattcaaaaaaaaaaaaaaa

SEQ ID NO: 103 - protein, 349 aa, Mus musculus
MYTPIPQSGSPFPASVQDPGLHIWRVEKLKPVPIARESHGIFFSGDSYLVLHNGPEEASHLHLWIGQQSSRDEQGACAVLAVHLNTLLGERPVQHREVQGNESDLFMSYFPRGLKYREGGVESAFHKTTSGATPAAIRKLYQVKGKKNIRATERALSWDSFNTGDCFILDLGQNIFAWCGGKSNILERNKARDLALAIRDSERQGKAQVEIITDGEEPAEMIQVLGPKPALKEGNPEEDITADQTNAQAAALYKVSDATGQMNLTKVADSSPFASELLIPDDCFVLDNGLCGKIYIWKGRKANEKERQAALQVADGFISRMRYSPNTQVEILPQGRESPIFKQFFKNWK

SEQ ID NO: 104 - DNA, 1075 bp, Rattus norvegicus
  CDS (54)..(617)
gtttaactgcactcgggactcggcgcgcgcgtgtgtctgttctctccatcgtcatggccgccgacatcagccagtgggccgggccgctgtcattacaggaggtggatgagccgccccagcacgccctgagggtcgactacggcggagtaacggtggacgagctgggcaaagtgctgacgcccacccaggtcatgaatagaccaagcagcatttcatgggatggccttgatcctgggaagctctacaccctggtcctcacagaccccgatgctcccagcaggaaggaccccaaattcagggagtggcaccacttcctggtggtcaacatgaagggcaacgacattagcagtggcactgtcctctccgaatacgtgggctccggacctcccaaagacacaggtctgcaccgctacgtctggctggtgtatgagcaggagcagcctctgaactgtgacgagcccatcctcagcaacaagtctggagacaaccgcggcaagttcaaggtggagtccttccgcaagaagtaccacctgggagccccggtggccggcacgtgcttccaggcagagtgggatgactctgtgcccaagctgcatgatcagctggctgggaagtaggggcgctgcagagcccgcagccccggggaccccacagtacagtcaagtcgtataaagcatgtctgtggggtgtccccccacgcccatccttccttcccaccctctcatagggagttctcagttgtgctaggttacagctctaggatgtcttccactttgtccaggaccaggcccagtaacatcttttggggtgggcttatcaatcctcccatctcggctgagccctgaccgcccaggtcagatggctgcatagttatcaatattcctgggctgctgctacgcagtgctgctgtgtggaggccaggctgtggagagagaccctgttagccccttacatcccagtgggataagcaaaagtcaccggagttgctgggcgtgttaaacctcatcaaatacaaataaagggcattgcattcagaaaaaaaaaaaaaaaaaaaaaaaaaaaaaaaaaaaaaaaa

SEQ ID NO: 105 - protein, 187 aa, Rattus norvegicus
MAADISQWAGPLSLQEVDEPPQHALRVDYGGVTVDELGKVLTPTQVMNRPSSISWDGLDPGKLYTLVLTDPDAPSRKDPKFREWHHFLVVNMKGNDISSGTVLSEYVGSGPPKDTGLHRYVWLVYEQEQPLNCDEPILSNKSGDNRGKFKVESFRKKYHLGAPVAGTCFQAEWDDSVPKLHDQLAGK

SEQ ID NO: 106 - DNA, 1037 bp, Rattus norvegicus
  CDS (29)..(592)
cgcgcgtgtgtctgttctctccatcgtcatggccgccgacatcagccagtgggccgggccgctgtcattacaggaggtggatgagccgccccagcacgccctgagggtcgactacggcggagtaacggtggacgagctgggcaaagtgctgacgcccacccaggtcatgaatagaccaagcagcatttcatgggatggccttgatcctgggaagctctacaccctggtcctcacagaccccgatgctcccagcaggaaggaccccaaattcagggagtggcaccacttcctggtggtcaacatgaagggcaacgacattagcagtggcactgtcctctccgaatacgtgggctccggacctcccaaagacacaggtctgcaccgctacgtctggctggtgtatgagcaggagcagcctctgaactgtgacgagcccatcctcagcaacaagtctggagacaaccgcggcaagttcaaggtggagtccttccgcaagaagtaccacctgggagccccggtggccggcacgtgcttccaggcagagtgggatgactctgtgcccaagctgcacgatcagctggctgggaagtaggggcgctgcagagcccgcagccccggggaccccacagtacagtcaagtcgtataaagcatgtgctgtggggtgtccccccacgcccatccttccttcccaccctctcatagggagttctcagttgtgctaggttacagctctaggatgtcttccactttgtccaggaccaggcccagtaacatcttttggggtgggcttatcaatcctcccatctcggctgagccctgaccgcccaggtcagatggctgcatagttatcaatattcctgggctgctgctcagcagtgctgctgtgtggaggccaggctgtggagagagaccctgttagccccttacatcccagtgggataagcaaaagtcaccggagttgctgggcgtgttaaacctcatcaaatacaaataaagggcattgcattcaaaaaaaaaaaaaaaaaaaaaaaaaaaa

SEQ ID NO: 107 - protein, 187 aa, Rattus norvegicus; identical to SEQ ID NO: 105

SEQ ID NO: 108 - DNA, 1891 bp, Rattus norvegicus
  CDS (351)..(723)
  CDS (1397)..(1460)
  CDS (1572)..(1749)
caccgcccttcagactgcagcgttctaagcgacagtgggaactgctccagctaccggtattacagtcatttgttttcttcaactagagaagtttccagatggggcagaaccttcctgcccctgcctgcccgcccccttcgtaagcttagggggaggaatgcagaggggaggggcggcgagggacggccccttagacggtccattgccattaatagagacctgaagcaccgcctgctaaaaatacccggctggacacccataaaagcacagttggggctccagctcggcacttctcggatcctcagcccagtgcttctagatcctcagccctgaccagctcagccaagaccatgaccgagcgccgcgtgcccttctcgctactgcggagccccagctgggagccgttccgggactggtaccctgcccacagccgcctcttcgatcaagctttcggggtgcctcggtttcccgatgagtggtctcagtggttcagctccgctggttggcccggctatgtgcgccctctgcccgccgcgaccgccgagggccccgcagcagtgaccctggcccggccgttcagccgggcgctcaaccggcaactcagcagcggtgtgtcagagatccgacagacggccgatcgctggcgcgtgtccctggacgtcaaccacttcgctcctgaggagctcacagtgaagaccaaggaaggcgtggtggagatcactggtgagtttcccttatcccaagaggggacgaagctggtggggcgagcgagtaccgtggtggcagtggaggtggggggtgggggtgggtgctgaaaccttgagggacaggaccctgaaaagttagaaatgagctcagggacccggagacccgcgtcattctccctagcctgcttctcttgccccggaacgcgggtgcaggtttgctcctaaaagctctgtcatcttcgatgataaggaccaacagctgggggtgtagctcagggcagagtcttgcctggcaagcccggagccttgaggcttgaccacccgcagcacagaaacaaaatgaaggaagacccaaggcaccttctggaagacctcatccccaaataagcaagtggcaggactccagtcagggacctccagtcagggtccctagacccagccgcggtgggggcgtgcgcacagcttcgagtatgcctacgatctggcatccaagcctgggtcagagccaagcccaggtccgggacctttgcatccccaaatctcagaagcgaactttctggaaagttttaagatcccagacagtcaggcatcccaccacactcttaatttgtttgcctccttgggccccagccattccttagctaggactgcagagggctgcctctgacctccttctgtcccacccacaggcaagcacgaagaaaggcaggatgaacatggctacatctctcggtgcttcacccggaaatacacgtgagttctggttccttgcatggagagctggggggtgggggagcggaccctgggcggagggcggggtcaggagggatgtgtaacccttgtcctttgtttctgctcctctaggctccctccaggtgtggaccccaccttggtgtcctcttccctgtcccctgagggcacactcacggtggaggctccgctgcccaaagcagtcacacaatcagcggagatcaccattccggtcactttcgaggcccgtgcccaaattggaggcccagagtcggaacagtctggagccaagtagaagccttcagcttgctacccatccccagtagccgtcaccagccctccctctctgtcaatctgaatgctcttttgatacatgtactttctgttttactcaaataaaagttggaaactactgctcaccaccctctcagaat

SEQ ID NO: 109 - protein, 205 aa, Rattus norvegicus
MTERRVPFSLLRSPSWEPFRDWYPAHSRLFDQAFGVPRFPDEWSQWFSSAGWPGYVRPLPAATAEGPAAVTLARPFSRALNRQLSSGVSEIRQTADRWRVSLDVNHFAPEELTVKTKEGVVEITGKHEERQDEHGYISRCFTRKYTLPPGVDPTLVSSSLSPEGTLTVEAPLPKAVTQSAEITIPVTFEARAQIGGPESEQSGAK

SEQ ID NO: 110 - DNA, 1271 bp, Rattus norvegicus
  CDS (159)..(749)
gaattccgccgggagagtacaggagatatcttgactggggggctgcaaacgccaaagttggctcttttagaagagtcatggatttttactgaggcattttgagactctacttttctcctctagaaactaataaaatatgtagcttcaccaaccagaacatggacgtcaccatccagcacccttggttcaagcgcgccctggggcccttctaccccagccgactgttcgaccagttcttcggcgagggcctttttgaatacgacctgctgcccttcctgtcttccaccatcagcccctactaccgccagtctctcttccgcacagtgttggactccggcatctctgagctcatgacccatatgtggtttgtaatgcaccaaccacatgctggaaaccccaagaacaaccccggcaaggtccgatctgaccgggacaagtttgtcatcttcttggatgtgaagcacttctctcctgaggacctcaccgtgaaggtactggaagatttcgtggagatccatggcaaacacaacgagaggcaggatgaccatggctacatttcccgtgaatttcaccgtcgctaccgtctgccttccaatgtggaccagtccgccctctcctgctccttgtctgcggatggcatgctgaccttctctggccccaaggtccagtctggcttggatgctggccacagcgagagggccattcccgtgtcacgggaggagaagcccagctcggcaccctcgtcctgagcaggcctcgccttggttgtcccctgaggcccctgatccatccagcccaggggccacagcaaagagtctgccttcctgacttcttttctttctctttgtttcctttccactttctcagagggctgaggatttgagagagtggcttaaagagcttggggggtcttggcctgagatggctgcgggttcagggtgacccaggctcaacaccagccggtcagagggaatgatggcattgaactcttaagatttcctgtcctcctggaaagtggcatcgagctctgctccaaaggcagagtgaatggtggctaaccaaccccaagagccctctgccaagcccctggatggcagcctcccaccccctttgcccacacttaccgcaggcgtatatgctgggctccaacagtccgcttctctcatgccctcttcctgtgactttctctactatgtagtatcgctcctggggaccctggtcacccatgagaatggagcccctggcagacaataaagagcaggtgcgaattc

SEQ ID NO: 111 - protein, 196 aa, Rattus norvegicus
MDVTIQHPWFKRALGPFYPSRLFDQFFGEGLFEYDLLPFLSSTISPYYRQSLFRTVLDSGISELMTHMWFVMHQPHAGNPKNNPGKVRSDRDKFVIFLDVKHFSPEDLTVKVLEDFVEIHGKHNERQDDHGYISREFHRRYRLPSNVDQSALSCSLSADGMLTFSGPKVQSGLDAGHSERAIPVSREEKPSSAPSS

SEQ ID NO: 112 - DNA, 1056 bp, Rattus norvegicus
  CDS (13)..(534)
gaattccggaacatggacgtcaccatccagcacccttggttcaagcgcgccctggggcccttctaccccagccgactgttcgaccagttcttcggcgagggcctttttgaatacgacctgctgcccttcctgtcttccaccatcagcccctactaccgccagtctctcttccgcacagtgttggactccggcatctctgaggtccgatctgaccgggacaagtttgtcatcttcttggatgtgaagcacttctctcctgaggacctcaccgtgaaggtactggaagatttcgtggagatccatggcaaacacaacgagaggcaggatgaccatggctacatttcccgtgaatttcaccgtcgctaccgtctgccttccaatgtggaccagtccgccctctcctgctccttgtctgcggatggcatgctgaccttctctggccccaaggtccagtctggcttggatgctggccacagcgagagggccattcccgtgtcacgggaggagaagcccagctcggcaccctcgtcctgagcaggcctcgccttggttgtcccctgaggcccctgatccatccagcccaggggccacagcaaagagtctgccttcctgacttcttttctttctctttgtttcctttccactttctcagagggctgaggatttgagagagtggcttaaagagcttggggggtcttggcctgagatggctgcgggttcagggtgacccaggctcaacaccagccggtcagagggaatgatggcattgaactcttaagatttcctgtcctcctggaaagtggcatcgagctctgctccaaaggcagagtgaatggtggctaaccaaccccaagagccctctgccaagcccctggatggcagcctcccaccccctttgcccacacttaccgcaggcgtatatgctgggctccaacagtccgcttctctcatgccctcttcctgtgactttctctactatgtagtatcgctcctggggaccctggtcacccatgagaatggagcccctggcagacaataaagagcaggtgcgaattc

SEQ ID NO: 113 - protein, 173 aa, Rattus norvegicus
MDVTIQHPWFKRALGPFYPSRLFDQFFGEGLFEYDLLPFLSSTISPYYRQSLFRTVLDSGISEVRSDRDKFVIFLDVKHFSPEDLTVKVLEDFVEIHGKHNERQDDHGYISREFHRRYRLPSNVDQSALSCSLSADGMLTFSGPKVQSGLDAGHSERAIPVSREEKPSSAPSS

SEQ ID NO: 114 - DNA, 2446 bp, Sus scrofa
  CDS (1)..(2322)
cgcttggcgcgctggtcgtggcgctgtgcgcgctgtcgccgcccgcccgcgcggccaccgcgtcgcggggggcgccccaggcacgggcgccccaggggcgggtatccccgatgcggcccagcaccatggtggtggaacaccccgagttcctcaaggcagggaaggagcccggactgcagatctggcgcgtggagaagttcgacctggttcctgtgccccccaacctttacggagacttcttcacaggcgatgcctatgtcatcctgaagacggtgcagctgaggaacgggaacctgcagtatgacctccactactggctgggcaatgaatgcagccaggatgagagcggggcagctgccatcttcaccgtgcagctggatgactacctgaacggtcgggccgtgcagcaccgcgaggtccagggcttcgagtcagccaccttccttggctacttcaaatctggtctcaagtacaagaaaggaggagtggcatcaggattcaagcacgtggtacccaacgaagtggcggtgcagagactcttccaggtcaaagggcggcgtgtggtccgcgccaccgaggtgcctgtgtcctgggagagcttcaaccgtggcgactgcttcatcctggacctgggcaacgacatctaccagtggtgtggctccaacagcaatcggtatgagaggctaaaggccacccaggtgtctaagggcatccgggacaatgagcggagtggccgggcccatgtgcacgtgtctgaggaggatgccgagcctgccgggatgctccaggtgctgggccccaagccaactctgcccgaaggtactgaggacacagtgaaggaggacgcggccaaccgcaagctggccaagctctacaaggtctccaacggcgcaggcaccatgacagtctccctcgtggccgatgagaaccccttcgcccagggggccttgaagtcagaggactgcttcatcctggaccacggcaaagatgggaagatctttgtctggaaaggtaagcaggccaacacggaggagaggaaggctgccctcaaaacggcctccgacttcatctccaagatgaactatcccaagcagacccaggtctccgtccttcccgagggcggcgagaccccactgttcaaacagttcttcaagaactggcgggacccagaccaggtggacggcccgggcctgagctatctctccagccacatcgccaacgtggagcgtgtgcccttcgacgctgccactctgcatacctccacggccatggctgcccagcacggcatggatgacgatggcacaggccagaaacagatctggagaatcgaaggctccaacaaagtgcctgtggaccctgccacgtacggacagttctacggtggtgacagctacattatcctgtacaactaccgtcatggtggccgtcagggacagatcatctacaactggcagggcgcccagtccacccaggatgaggtcgccgcgtctgccatcctgactgcccagctggatgaggagctgggaggtaccccagtccagagccgtgtggtccaaggcaaggaacccgctcacctcatgagcctgtttggtgggaaacccatgatcatctacaggggtggcacctcccgcgagggtggacagacagcccccgccagtacccgcctcttccaggtccgggccagcagctctggagccacccgagccgttgaggtgatccccaaggccggcgcactaaactccaacgatgcctttgtcctgaaaaccccctcagctgcctacctgtgggtggggacaggagccagcgaggccgagaagaccggggcccaggagctgctccgcgtgcttcgggcccaacctgtgcaggtggcagaaggcagcgagccagacagcttctgggaggccctgggcgggaaggccgcctaccgcacgtccccacggctgaaggacaagaagatggacgcccaccctccccgcctcttcgcctgctccaacaagattggacgttttgtggtcgaagaggttcctggcgagctcatgcaggaggacctggccactgatgacgtcatgctcctggacacctgggaccaggtctttgtctgggttgggaaggattcccaagaggaggaaaagacagaagccttgacctctgctaagcggtacatcgagacggacccagctaatcgcgacaggagaacccccatcaatgtggtgaagcaaggctttgagcctccttcctttgtgggctggttcctcggctgggatgacaactactggtcggtggatcccttggacagggccatcgctgagctggctgcctgaagaagggcaggccccacccatcaccggtcagtgcctttcagaactgtccatccctcaaggagaccttagagcgtgcagggccactctggtgtgtgcgtgtgtggttttgttgttggttttttgtc

SEQ ID NO: 115 - protein, 88 aa, Sus scrofa
RLARWSWRCARCRRPPARPPRRGGRPRHGRPRGGYPRCGPAPWWWNTPSSSRQGRSPDCRSGAWRSSTWFLCPPTFTETSSQAMPMSS

SEQ ID NO: 116 - protein, 4 aa, Sus scrofa
RRCS

SEQ ID NO: 117 - protein, 35 aa, Sus scrofa
GTGTCSMTSTTGWAMNAARMRAGQLPSSPCSWMTT

SEQ ID NO: 118 - protein, 98 aa, Sus scrofa
TVGPCSTARSRASSQPPSLATSNLVSSTRKEEWHQDSSTWYPTKWRCRDSSRSKGGVWSAPPRCLCPGRASTVATASSWTWATTSTSGVAPTAIGMRG

SEQ ID NO: 119 - protein, 49 aa, Sus scrofa
RPPRCLRASGTMSGVAGPMCTCLRRMPSLPGCSRCWAPSQLCPKVLRTQ

SEQ ID NO: 120 - protein, 21 aa, Sus scrofa
RRTRPTASWPSSTRSPTAQAP

SEQ ID NO: 121 - protein, 15 aa, Sus scrofa
QSPSWPMRTPSPRGP

SEQ ID NO: 122 - protein, 42 aa, Sus scrofa
SQRTASSWTTAKMGRSLSGKVSRPTRRRGRLPSKRPPTSSPR

SEQ ID NO: 123 - protein, 37 aa, Sus scrofa
TIPSRPRSPSFPRAARPHCSNSSSRTGGTQTRWTARA

SEQ ID NO: 124 - protein, 101 aa, Sus scrofa
AISPATSPTWSVCPSTLPLCIPPRPWLPSTAWMTMAQARNRSGESKAPTKCLWTLPRTDSSTVVTATLSCTTTVMVAVRDRSSTTGRAPSPPRMRSPRLPS

SEQ ID NO: 125 - protein, 26 aa, Sus scrofa
LPSWMRSWEVPQSRAVWSKARNPLTS

SEQ ID NO: 126 - protein, 7 aa, Sus scrofa
ACLVGNP

SEQ ID NO: 127 - protein, 36 aa, Sus scrofa
SSTGVAPPARVDRQPPPVPASSRSGPAALEPPEPLR

SEQ ID NO: 128 - protein, 6 aa, Sus scrofa
SPRPAH

SEQ ID NO: 129 - protein, 7 aa, Sus scrofa
TPTMPLS

SEQ ID NO: 130 - protein, 60 aa, Sus scrofa
KPPQLPTCGWGQEPARPRRPGPRSCSACFGPNLCRWQKAASQTASGRPWAGRPPTARPHG

SEQ ID NO: 131 - protein, 66 aa, Sus scrofa
RTRRWTPTLPASSPAPTRLDVLWSKRFLASSCRRTWPLMTSCSWTPGTRSLSGLGRIPKRRKRQKP

SEQ ID NO: 132 - protein, 22 aa, Sus scrofa
PLLSGTSRRTQLIATGEPPSMW

SEQ ID NO: 133 - protein, 36 aa, Sus scrofa
SKALSLLPLWAGSSAGMTTTGRWIPWTGPSLSWLPE

SEQ ID NO: 134 - DNA, 2446 bp, Sus scrofa; identical to SEQ ID NO: 114
  CDS (1)..(2322)

SEQ ID NO: 135 - protein, 88 aa, Sus scrofa; identical to SEQ ID NO: 115

SEQ ID NO: 136 - protein, 4 aa, Sus scrofa
RRCS

SEQ ID NO: 137 - protein, 35 aa, Sus scrofa; identical to SEQ ID NO: 117

SEQ ID NO: 138 - protein, 98 aa, Sus scrofa; identical to SEQ ID NO: 118

SEQ ID NO: 139 - protein, 49 aa, Sus scrofa; identical to SEQ ID NO: 119

SEQ ID NO: 140 - protein, 21 aa, Sus scrofa
RRTRPTASWPSSTRSPTAQAP

SEQ ID NO: 141 - protein, 15 aa, Sus scrofa
QSPSWPMRTPSPRGP

SEQ ID NO: 142 - protein, 42 aa, Sus scrofa; identical to SEQ ID NO: 122

SEQ ID NO: 143 - protein, 37 aa, Sus scrofa; identical to SEQ ID NO: 123

SEQ ID NO: 144 - protein, 101 aa, Sus scrofa; identical to SEQ ID NO: 124

SEQ ID NO: 145 - protein, 26 aa, Sus scrofa
LPSWMRSWEVPQSRAVWSKARNPLTS

SEQ ID NO: 146 - protein, 7 aa, Sus scrofa
ACLVGNP

SEQ ID NO: 147 - protein, 36 aa, Sus scrofa; identical to SEQ ID NO: 127

SEQ ID NO: 148 - protein, 6 aa, Sus scrofa
SPRPAH

SEQ ID NO: 149 - protein, 7 aa, Sus scrofa
TPTMPLS

SEQ ID NO: 150 - protein, 60 aa, Sus scrofa; identical to SEQ ID NO: 130

SEQ ID NO: 151 - protein, 66 aa, Sus scrofa; identical to SEQ ID NO: 131

SEQ ID NO: 152 - protein, 22 aa, Sus scrofa
PLLSGTSRRTQLIATGEPPSMW

SEQ ID NO: 153 - protein, 36 aa, Sus scrofa; identical to SEQ ID NO: 133

SEQ ID NO: 154 - DNA, 590 bp, Rattus norvegicus
  CDS (90)..(386)
gcaggtttttctagggtccagacacccaggtctcctagttggctctctccgtagcttctctgtgatattctaaccagtgcttgccaaagatgatgtgtggcgcgccatccgccacaatgccggccacgaccgagacgcaggagatcgccgacaaggtgaagtctcaacttgaagagaaagcaaatcagaagtttgatgtctttaaagccatatccttcaggagacaggtagtggccggcaccaacttcttcatcaaggttgatgtcggcgaagaaaaatgtgtgcacttgagggtgtttgaacccctccctcatgagaacaagcctttgaccttgtcttcttaccagaccgacaaagaaaagcacgatgagctaacctacttctgattactgcagcccctttgccaaatacttcacctttggaatccgtgtttgggaccacgaagtaaatacccctctgtgagcagcttcctttgtgatgcccaaacggcgttgtattttgtttctttccaaacaattattttcagaaaactgtataaaaactatctctctaaatatatatttttagagaccgtaaaaaaaaaaaaaaaa

SEQ ID NO: 155 - protein, 98 aa, Rattus norvegicus
MMCGAPSATMPATTETQEIADKVKSQLEEKANQKFDVFKAISFRRQVVAGTNFFIKVDVGEEKCVHLRVFEPLPHENKPLTLSSYQTDKEKHDELTYF

SEQ ID NO: 156 - DNA, 1631 bp, Rattus norvegicus
  CDS (26)..(1456)
tgctgcaggactccctggacgcaaaatgaagagggttctggttctcctgctggccttagcctttgggcatgccctagagagaggccgagattatgagaaggataaagtttgccaggaactctccacgctggggaaagatgacttcagatctctatcactaatcctatacagcaggaagtttcccagtagcacctttgaacaggtcagtcagcttgtgaaggaagttgtctccttaactgaggaatgctgtgctgagggagcagatcccaactgctatgacaccaggacttcagagctgtctattaagtcctgtgaaagtgacgccccctttcctgttcaccccgggacttccgagtgttgcacgaaggaggggctagagcggaaactctgcatggctgccctcagtcaccagccacagcaatttcccgcctatgtggagccgacgaatgatgagatctgtgaggcgttcaggaaggatccaaagggatttgccgatcagtttctattcgaatattccagcaattacggacaagctcctctgccacttttagttggttacaccaagagttatctctctatggtcggctcctgctgtacttctgcaaaaccaactgtgtgctttttgaaggagagactccagatgaaacagttatcacttctcaccactatgtcaaacagagtctgctcacaatatgctgcatatggaaaggaaaaatcaaggatgagccatctcataaaactagcccaaaaagtaccaactgctaacctggaggatgttctgccactcgctgaagaccttactgaaatcctgtccagatgttgtaagtctacctcagaggactgcatggccagagagctgcctgaacacacattaaaaatctgtggaaacttatccaaaaagaattcaaagtttgaagagtgctgttacgaaacaacacccatgggcatttttatgtgtagctacttcatgccaactgctgaaccacttcaattgccagccatcaagctgccaaccagcaaagacctctgtggtcagagtgccacacaagccatggaccagtatacatttgaactaagcagaaggacccaggttccagaagtgttcctcagcaaagttctggatacgaccctgaaaacccttagggaatgctgcgacactcaggactctgtctcctgtttcagcactcagagtcccctgatgaagaggcaactaacttctttcattgaaaaggggcaagaaatgtgtgcagattattccgagaacacatttactgagtacaagaaaaaattggcggaacgactgaggacaaaaatgcccaatgcctccccggaagagctggcagacatggtggccaagcactcagactttgcctccaagtgctgctccataaactctcctccacgctactgtagctcacagattgatgcagaaatgagagacatcctgcagtcctgatgcagggtatatgcaatgccttggacctagaactggaccactctggaaaattgccagataacaaaatcaagcaaataccacagagatggccttccaagaagaccaccaagataattccatttttcccagctacaatgttttttgatgaattataaaaataaattgaaatatagtg

SEQ ID NO: 157 - protein, 476 aa, Rattus norvegicus
MKRVLVLLLALAFGHALERGRDYEKDKVCQELSTLGKDDFRSLSLILYSRKFPSSTFEQVSQLVKEVVSLTEECCAEGADPNCYDTRTSELSIKSCESDAPFPVHPGTSECCTKEGLERKLCMAALSHQPQQFPAYVEPTNDEICEAFRKDPKGFADQFLFEYSSNYGQAPLPLLVGYTKSYLSMVGSCCTSAKPTVCFLKERLQMKQLSLLTTMSNRVCSQYAAYGKEKSRMSHLIKLAQKVPTANLEDVLPLAEDLTEILSRCCKSTSEDCMARELPEHTLKICGNLSKKNSKFEECCYETTPMGIFMCSYFMPTAEPLQLPAIKLPTSKDLCGQSATQAMDQYTFELSRRTQVPEVFLSKVLDTTLKTLRECCDTQDSVSCFSTQSPLMKRQLTSFIEKGQEMCADYSENTFTEYKKKLAERLRTKMPNASPEELADMVAKHSDFASKCCSINSPPRYCSSQIDAEMRDILQS

SEQ ID NO: 158 - DNA, 1620 bp, Rattus norvegicus
  CDS (6)..(1436)
gcaaaatgaagagggttctggttctcctgctggccttagcctttgggcatgccctagagagaggccgagattatgagaaggataaagtttgccaggaactctccacgctggggaaagatgacttcagatctctatcactaatcctatacagcaggaagtttcccagtagcacctttgaacaggtcagtcagcttgtgaaggaagttgtctccttaactgaggaatgctgtgctgagggagcagatcccaactgctatgacaccaggacttcagagctgtctattaagtcctgtgaaagtgacgccccctttcccgttcaccccgggacttccgagtgttgcacgaaggaggggctagagcggaaactctgcatggctgccctcagtcaccagccacaggaatttcccgcctatgtggagccgacgaatgatgagatctgtgaggcgttcaggaaggatccaaagggatttgccgatcagtttctattcgaatattccagcaattacggacaagctcctctgccacctttagttggttacaccaagagttatctctctatggttggctcctgctgtacttctgcaaaaccaactgtgtgctttttgaaggagagactccagatgaaacagttactacttctcaccactatgtcaaacagagtctgctcacaatatgctgcatatggaaaggaaaaatcaaggatgagccatctcataaaactagcccaaaaagtaccaactgctaacctggaggatgttctgccactcgctgaagaccttactgaaatcctgtccagatgttgtaagtctacctcagaggactgcatggccagagagctgcctgaacacacattaaaaatctgtggaaacttatccaaaaagaattcaaagtttgaagagtgctgttacgaaacaacacccatgggcatttttatgtgtagctacttcatgccaactgctgaaccacttcaattgccagccatcaagctgccaaccagcaaagacctctgtggtcagagtgccacacaagccatggaccagtatacatttgaactaagcagaaggacccaggttccagaagtgttcctcagcaaagttctggatacgaccctgaaaacccttagggaatgctgcgacactcaggactctgtctcctgtttcagcactcagagtcccctgatgaagaggcaactaacttctttcattgaaaaggggcaagaaatgtgtgcagattattccgagaacacatttactgagtacaagaaaaaattggcggaacgactgaggacaaaaatgcccaatgcctccccggaagagctggcagacatggtggccaagcactcagactttgcctccaagtgctgctccataaactctcctccacgctactgtagctcacagattgatgcagaaatgagagacatcctgcagtcctgatgcagggtatatgcaatgccttggacctagaactggaccactctggaaaaattgccagataacaaaatcaagcaaataccacagagatggccttccaggaggaccaccaggataattccatttttcccatctacaatgttttttgatgaattataaaaataaattgaaatatggtgcaaactct

SEQ ID NO: 159 - protein, 476 aa, Rattus norvegicus
MKRVLVLLLALAFGHALERGRDYEKDKVCQELSTLGKDDFRSLSLILYSRKFPSSTFEQVSQLVKEVVSLTEECCAEGADPNCYDTRTSELSIKSCESDAPFPVHPGTSECCTKEGLERKLCMAALSHQPQEFPAYVEPTNDEICEAFRKDPKGFADQFLFEYSSNYGQAPLPPLVGYTKSYLSMVGSCCTSAKPTVCFLKERLQMKQLLLLTTMSNRVCSQYAAYGKEKSRMSHLIKLAQKVPTANLEDVLPLAEDLTEILSRCCKSTSEDCMARELPEHTLKICGNLSKKNSKFEECCYETTPMGIFMCSYFMPTAEPLQLPAIKLPTSKDLCGQSATQAMDQYTFELSRRTQVPEVFLSKVLDTTLKTLRECCDTQDSVSCFSTQSPLMKRQLTSFIEKGQEMCADYSENTFTEYKKKLAERLRTKMPNASPEELADMVAKHSDFASKCCSINSPPRYCSSQIDAEMRDILQS

SEQ ID NO: 160 - DNA, 900 bp, Rattus norvegicus
  CDS (27)..(773)
cgcgagcccagtggagcgagtgagctatggccggcctcaactcactggaggcggtgaagcgcaagatccaggccctgcagcagcaggcggacgacgcagaggaccgtgcgcagggcctgcagcgcgagctggatggcgagcgcgaacggcgcgagaaagctgaaggagatgcggccgctctcaaccgtcgcatccagctggtggaggaagagctggaccgggctcaggagcgactggccacagccctgcagaagctggaggaggcagagaaggctgctgacgagagtgagagaggcatgaaggtgatagagaaccgagccatgaaagacgaggagaagatggagatccaggagatgcagctcaaagaagccaagcacatcgctgaggaggctgaccggaagtatgaggaggttgctcgtaagttggtcatcctggagggtgagctggagagagcagaggagcgggcggaggtgtctgaactaaagagtagcgacctggaagaggagctcaagaacgtaactaacaatctgaaatcactggaggctgcttctgaaaagtactctgaaaaggaggataaatatgaagaagaaatcaagcttctgtctgacaaactgaaagaggctgagacccgagctgagtttgcggaaaggacagtttctaaactggagaagacaatcgatgacctggaagaaaaacttgcccaggccaaagaagagaacgtgggcttgcatcagacactggaccagacactaaacgaacttaactgtatataaaccaaaccagaagagtcctgtcttgataccaactccactccagagagtgcaccctgtcttcctctcttataagaagttccgcttactaccatgtctccaccttgctggaaaggccaagcagaaaaat

SEQ ID NO: 161 - protein, 248 aa, Rattus norvegicus
MAGLNSLEAVKRKIQALQQQADDAEDRAQGLQRELDGERERREKAEGDAAALNRRIQLVEEELDRAQERLATALQKLEEAEKAADESERGMKVIENRAMKDEEKMEIQEMQLKEAKHIAEEADRKYEEVARKLVILEGELERAEERAEVSELKSSDLEEELKNVTNNLKSLEAASEKYSEKEDKYEEEIKLLSDKLKEAETRAEFAERTVSKLEKTIDDLEEKLAQAKEENVGLHQTLDQTLNELNCI

SEQ ID NO: 162 - DNA, 755 bp, Rattus norvegicus
  CDS (617)..(730)
cccggggtaaactgaggcactcgaggcgtgcaggagatccgcctcccaagagacatttaatctggggggatttacaggaaacttctaaattaagggtagcggctgctgctagctgagggagggcacgcggtctctgtgcccaggcagctgccgtgacgtcacgccctgaaatagccccggggccccagccgcagctgccgctgggcccgcctgtcactcagaggaagcgctgagcccccggcccaagggtcttgtagcctctgctgaccaaggtttttacagcccgcagtgagccagttttgcttccgacggctggctggggaagaaggaggcgggggccgggatccgagggggcggacccgaggggtgggcgcaaagggtggccgcgcccaagaccgggcagtgcgtctgcccctacaaggtttgggccttggtgggggagggtcctggtcccccggctccgcccggcttctccccgccttttagcgcccgcgctgctgggacatcacagtccctcttgatcctcctaacctgtcccgggtgcatcagtgctctcggctagcccggtctacctactcttcaccgctcgcccgccggcccactccccaccgcagccatggacgccatcaagaagaagatgcagatgctgaaactggacaaggagaatgccatcgaccgcgcagagcaggccgaagccgacaagaagcaagctgaagaccgatgcaagcaggtggggcccaccccttcttccacag

SEQ ID NO: 163 - protein, 38 aa, Rattus norvegicus
MDAIKKKMQMLKLDKENAIDRAEQAEADKKQAEDRCKQ

SEQ ID NO: 164 - DNA, 151 bp, Rattus norvegicus
  CDS (16)..(141)
ccccttcttccacagctggaggaagagcagcaggccctccagaagaaactgaaggggacagaggatgaggtggaaaagtattccgagtctgtgaaggatgcccaggagaaactggagcaggccgagaagaaggccaccgatgtgagtgtgg

SEQ ID NO: 165 - protein, 42 aa, Rattus norvegicus
LEEEQQALQKKLKGTEDEVEKYSESVKDAQEKLEQAEKKATD

SEQ ID NO: 166 - DNA, 159 bp, Rattus norvegicus
  CDS (16)..(150)
ccctctgacccacaggctgaagcagatgtggcttctctgaatcgacgcattcagctcgtagaggaggagttggatcgggcacaggagcgcctggctacagccttgcaaaagctggaggaggctgagaaagccgctgatgagagcgagaggtggggaagg

SEQ ID NO: 167 - protein, 45 aa, Rattus norvegicus
AEADVASLNRRIQLVEEELDRAQERLATALQKLEEAEKAADESER

SEQ ID NO: 168 - DNA, 143 bp, Rattus norvegicus
  CDS (16)..(132)
gtccctgcttctcagaggaatgaaggtcattgagaaccgggccatgaaggatgaggagaagatggagctgcaggagatgcagctgaaagaagccaagcacatcgctgaggactcagaccgcaaatacgaggaggtgacagcct

SEQ ID NO: 169 - protein, 5 aa, Rattus norvegicus
RNEGH

SEQ ID NO: 170 - protein, 6 aa, Rattus norvegicus
EPGHEG

SEQ ID NO: 171 - protein, 17 aa, Rattus norvegicus
GEDGAAGDAAERSQAHR

SEQ ID NO: 172 - protein, 8 aa, Rattus norvegicus
GLRPQIRG

SEQ ID NO: 173 - DNA, 96 bp, Rattus norvegicus
  CDS (16)..(87)
cccgcttcccctcaggtggccaggaagctggtgatcctggaaggagagctggagcgctctgaagagagagccgaggtggctgagaggtagggatac

SEQ ID NO: 174 - protein, 24 aa, Rattus norvegicus
VARKLVILEGELERSEERAEVAER

SEQ ID NO: 175 - DNA, 101 bp, Rattus norvegicus
  CDS (16)..(90)
gccccctgcccccagccgagctaggcagctggaggaggagcttcgaaccatggaccaggctctcaagtcgctgatagcctcagaggaggaggtagtagcct

SEQ ID NO: 176 - protein, 22 aa, Rattus norvegicus
AAGGGASNHGPGSQVADSLRGG

SEQ ID NO: 177 - DNA, 101 bp, Rattus norvegicus
  CDS (16)..(90)
cacacgcccctgcagtaaatgtggggacctagaggaggagctgaaaattgttaccaacaacttgaaatctctggaagcccaagcggacaaggtataggggg

SEQ ID NO: 178 - protein, 24 aa, Rattus norvegicus
MWGPRGGAENCYQQLEISGSPSGQ

SEQ ID NO: 179 - DNA, 88 bp, Rattus norvegicus
  CDS (16)..(78)
gtttgtctcttaaagtattccaccaaagaggacaaatacgaagaagagatcaaacttctggaggagaagctgaaggaggtgagactac

SEQ ID NO: 180 - protein, 21 aa, Rattus norvegicus
YSTKEDKYEEEIKLLEEKLKE

SEQ ID NO: 181 - DNA, 95 bp, Rattus norvegicus
  CDS (16)..(84)
ccttctttatttcaggctgagacccgagcagagtttgctgaaagatctgtggcaaagttggagaaaaccatcgatgacctggaaggtaaaaagga

SEQ ID NO: 182 - protein, 23 aa, Rattus norvegicus
AETRAEFAERSVAKLEKTIDDLE

SEQ ID NO: 183 - DNA, 328 bp, Rattus norvegicus
  CDS (16)..(99)
cttcggactccccagatgaagtctatgcacagaagatgaagtacaaggccatcagcgaggagctggacaacgcgctcaatgacatcacttccctctgagttcccactgtggccatcgcaggcccctttcttctttttccattctctctgaggggagggggcagccaggaggagcacaaactggccatgttgcacagccagtctgagggcagcctgagggaacacgcctgccacccctgccacccactctggcactggctttctcctgtcatctatccaccgtccactgacttccacccctcctctacttaataaactctgaacttggt

SEQ ID NO: 184 - protein, 7 aa, Rattus norvegicus
MKSMHRR

SEQ ID NO: 185 - protein, 20 aa, Rattus norvegicus
STRPSARSWTTRSMTSLPSE

SEQ ID NO: 186 - DNA, 168 bp, Rattus norvegicus
  CDS (16)..(99)
tgcttcccctcacagagactttggctagtgccaaggaagagaacgtggagattcaccagaccttggaccagacccttctggaactcaacaacctgtaagggtggccctgctacctgccgaccagactacatagatgcctcctcaggccaataaacggatgtctctggc

SEQ ID NO: 187 - protein, 28 aa, Rattus norvegicus
RLWLVPRKRTWRFTRPWTRPFWNSTTCK

SEQ ID NO: 188 - DNA, 589 bp, Rattus norvegicus
  CDS (3)..(446)
ggatggcttcccttcgcctgttcctcctctgcctcgctggactgatatttgcgtctgaagctggccctgggggtgctggagaatccaagtgtcctctgatggtcaaagtcctggatgctgtccgaggcagccctgctgttgatgtcgccgtgaaagtcttcaaaaagactgcagacggaagctgggagccgtttgcctctgggaagaccgccgagtctggagagctgcacgggctcaccacagatgagaagttcacggaaggggtgtacagggtagaactggacaccaaatcgtactggaaggctcttggcatttccccattccatgaatacgcagaggtggttttcacagccaatgactctggtcatcgccactacaccatcgcagccctgctcagcccgtactcctacagcaccactgctgtcgtcagtaacccccagaactgagggacccagcccaggaggaccaggatcttgccaaagcagtagcttcccatttgtactgaaacagtgttcttgctctataaaccgtgttagcaactcgggaagatgccgtgaaacgttcttattaaaccacctttatttcattc

SEQ ID NO: 189 - protein, 147 aa, Rattus norvegicus
MASLRLFLLCLAGLIFASEAGPGGAGESKCPLMVKVLDAVRGSPAVDVAVKVFKKTADGSWEPFASGKTAESGELHGLTTDEKFTEGVYRVELDTKSYWKALGISPFHEYAEVVFTANDSGHRHYTIAALLSPYSYSTTAVVSNPQN

SEQ ID NO: 190 - DNA, 589 bp, Rattus norvegicus
  CDS (3)..(446)
ggatggcttcccttcgcctgttcctcctctgcctcgctggactgatatttgcgtctgaagctggccctgggggtgctggagaatccaagtgtcctctgatggtcaaagtcctggatgctgtccgaggcagccctgctgtcgatgtggccgtgaaagtgttcaaaaagactgcagacggaagctgggagccgtttgcctctgggaagaccgccgagtctggagagctgcacgggctcaccacagatgagaagttcacggaaggggtgtacagggtagaactggacaccaaatcgtactggaaggctcttggcatttccccattccatgaatacgcagaggtggttttcacagccaatgactctggtcatcgccactacaccatcgcagccctgctcagcccgtactcctacagcaccactgctgtcgtcagtaacccccagaactgagggacccagcccaggaggaccaggatcttgccaaagcagtagcttcccatttgtactgaaacagtgttcttgctctataaaccgtgttagcaactcgggaagatgccgtgaaacgttcttattaaaccacctttatttcattc

SEQ ID NO: 191 - protein, 147 aa, Rattus norvegicus; identical to SEQ ID NO: 189

SEQ ID NO: 192 - DNA, 595 bp, Rattus norvegicus
  CDS (10)..(453)
cctgacaggatggcttcccttcgcctgttcctcctctgcctcgctggactgatatttgcgtctgaagctggccctgggggtgctggagaatccaagtgtcctctgatggtcaaagtcctggatgctgtccgaggcagccctgctgtcgatgtggccgtgaaagtgttcaaaaggactgcagacggaagctgggagccgtttgcctctgggaagaccgccgagtctggagagctgcacgggctcaccacagatgagaagttcacggaaggggtgtacagggtagaactggacaccaaatcatactggaaggctcttggcatttccccattccatgaatacgcagaggtggttttcacagccaatgactctggtcatcgccactacaccatcgcagccctgctcagcccgtactcctacagcaccactgctgtcgtcagtaacccccagaactgagggacccagcccacgaggaccaagatcttgccaaagcagtagctcccatttgtactgaaacagtgttcttgctctataaaccgtgttagcaactcgggaagatgccgtgaaacgttcttattaaaccacctttatttcattc

SEQ ID NO: 193 - protein, 147 aa, Rattus norvegicus
MASLRLFLLCLAGLIFASEAGPGGAGESKCPLMVKVLDAVRGSPAVDVAVKVFKRTADGSWEPFASGKTAESGELHGLTTDEKFTEGVYRVELDTKSYWKALGISPFHEYAEVVFTANDSGHRHYTIAALLSPYSYSTTAVVSNPQN

SEQ ID NO: 194 - DNA, 1303 bp, Rattus norvegicus
gtaacattacatatgttagtactcctaacacttcttgggactgtgcctcagggatcacaacctatataagtttagaagttctgaaagacagtcatgaccttggtatataggttcagatagtgtccagattggaatcctgatgctaaagacttagtaagagacaaaaaaaaggagttgagaattacttagggctagggctatctaggtgctacaagggcagcacaaggacatctgctgttgccctacaatacaaggcttatagagaattcagaactgccattgactcagatataaaaagagtaaaagactttttagctgacctccaagaatacctaacttccctctcagaggtagtccttcaaaataagaaaagattagacctgatattccttaaagaaggagtctgtgtgctatactgaaagaaaaatgttgcttctatacagaccattcaggagtaattaaagactccataaataaacttaaaaaaaggttagacaaaagacagacagacagaaaaacacatcagagatagttcgagagctagtttagtagatctccctggatgactaccctactctctgctacagctgggccattattaataattttcttggttttagtttttggctcctgcgtgacaaacaggttaattgcttttgttaaaaatcgagtgggtgctgtgcggttgatggttctgagacaacagtaccagtcagttaggacaactggtgagaccaaataatacttgatatcaaaattctaagattagaattatttaataggagaagacaggaatgaaaagaaaattatataaattctaggtttaaaaatataaaaattaaaaaaataaaccccaaaaggccacagacccagggctaagcctgcagccaagactagcaggccataaagataaaggagcacaggaaacactgttcaggcaggactgacaagccataaaaaaaggaatgcaggaaccagcctgagttaatgagactgattcatgggacgtctggcaggaagacatctcccccagctcactcagggccatatttcaactaggtgtcctccggcccctgataagcccctgacttctagcacgttactctttctgctttgttctcactgctatgtttgaatgagccaattgtatgtaaccacgccaaaacccctagccttctctatataaccctctgacttttgagtttcggggccgacacctctgtctcctgcgtgggatgcgtgtcggcccggagatctctgtaataggtctccgtaataaacctcgcctttgcttattacatcc

SEQ ID NO: 195 - DNA, 1796 bp, Rattus norvegicus
  CDS (81)..(1481)
gttcacagccactgcgccctcgctctcttcttgcagatcttgcagccgcagcaagccaggccacctcgtccttcgaagccatgtccaccaggtccgtgtcctcgtcctcctaccgcaggatgttcggtggctccggcacatcgagccggcccagctccaaccggagctatgtgaccacatccacccgcacctacagcctaggcagcgcgctgcgccccagcactagccgcagcctctattcctcgtccccgggtggcgcctatgtgacccggtcctccgccgtgcgcctgcggagcagcatgcccggcgtgcggctgctgcaggactccgtggacttctcgctggccgacgccatcaacaccgagttcaagaacacccgcaccaacgagaaggtggaattgcaggagctgaatgaccgcttcgccaactacatcgacaaggtgcgcttcctcgagcagcagaacaaaatcctgctggccgagctcgagcagcttaagggccagggcaagtcgcgcctgggcgacctctacgaggaggagatgagggagttgcgccggcaggtggatcagctcaccaatgacaaggcccgtgtcgaggtggagagggacaacctggccgaggacatcatgcggctgcgagaaaaattgcaggaggagatgctccagagggaggaagccgagagcaccctgcagtcattcagacaggatgttgacaatgcttctctggcacgtcttgaccttgaacgtaaagtggaatccttgcaggaagaaattgcctttttgaagaagctgcacgatgaagagatccaggagctgcaggcccagattcaggaacagcatgtccagatcgatgtggacgtttccaagcctgacctcaccgctgccctgcgtgatgtccgccagcagtatgaaagtgtggctgccaagaacctccaggaggccgaggaatggtacaagtccaagtttgctgacctctctgaggctgccaaccggaacaacgatgccctgcgccaggcaaagcaggagtcaaacgaataccggagacaggtgcagtcactcacctgcgaagtggatgcccttaaaggcactaatgagtccctggagcgccagatgcgtgaaatggaagagaattttgcccttgaagctgctaactaccaggacactattggccgcctgcaggatgagatccagaacatgaaggaagagatggctcgccaccttcgtgaataccaggacctgctcaatgtaaagatggctcttgacattgagatcgccacctacaggaagctgctggaaggggaggagagcaggatttctctgcctcttccaaacttttcttccctgaacctgagagaaactaacctggagtcacttcctctggttgacacccactccaaaagaacactcctgattaagacggttgaaaccagagacggacaggtgatcaatgagacttctcagcaccacgatgaccttgaataaaaactgcacaggctcagtgcaacggcgcagtaccagcaagaaggaaaaaaaaatcgtatcttagaaaaaagagctttcaagtgcctttactgcagttttcaggagcgcaagatagatctgggatagaaacgagctcagcacataacaactgacacccccaaaaggcgtagaaaaggtttacaaaataatctagttttacgaagaaatcttgtgctagaatactttttaaagtatttttgaataccattaaaactgctttctttttccagaaaatatctgaccaacttgttactgcttcaataaaacttcagaaat

SEQ ID NO: 196 - protein, 466 aa, Rattus norvegicus
MSTRSVSSSSYRRMFGGSGTSSRPSSNRSYVTTSTRTYSLGSALRPSTSRSLYSSSPGGAYVTRSSAVRLRSSMPGVRLLQDSVDFSLADAINTEFKNTRTNEKVELQELNDRFANYIDKVRFLEQQNKILLAELEQLKGQGKSRLGDLYEEEMRELRRQVDQLTNDKARVEVERDNLAEDIMRLREKLQEEMLQREEAESTLQSFRQDVDNASLARLDLERKVESLQEEIAFLKKLHDEEIQELQAQIQEQHVQIDVDVSKPDLTAALRDVRQQYESVAAKNLQEAEEWYKSKFADLSEAANRNNDALRQAKQESNEYRRQVQSLTCEVDALKGTNESLERQMREMEENFALEAANYQDTIGRLQDEIQNMKEEMARHLREYQDLLNVKMALDIEIATYRKLLEGEESRISLPLPNFSSLNLRETNLESLPLVDTHSKRTLLIKTVETRDGQVINETSQHHDDLE

SEQ ID NO: 197 - DNA, 2684 bp, Rattus norvegicus
ctccgaagaccccttggagacggaatcctactagaggccagaaaaaatgttccagacacgatggaaggccctcacttctgcctgctctcttcagacgcctaaagacaggaacagttctcttcatgaatgaaggtcagagacaagtgggtgctgccatggtggacaacacagtgtcatctagaatggctgaaccccaacccccagcacatcagcaccacagatgcctttgccatctcttagatgccctgatgaagccaacaactgtgagtactattcattgctcaggatatcaggaggaaagagattcagtgacatgggacagtaacaaagcagataaagtggctcaggaaatggctatgcaggagcctatcctggttataggcctacaagagacagccactgggaactgagattagactaagggatgacctcacttagaatgtacaacagaaaaaaaggcccaagttgtttaaaagataaaaggacaatgacacacttgggagaaagctatacccccagagaacaaacaaaagactcactttgccaaattaaaaaatagactcatttaagagataaaaaatttgtccaaatagttaagtgtatataatagactttaagattttagccagagagacagtaaaaaatataagatatgtcagtaaacaaatgcttaacaaacaaacaggacaaagagacctagagagtttaacgaaaagttgaagtgaacttcactgagataaaaccagaaaaatatgatcacaagtatctcctagtgcttgtagataccttttcaggaatagataaaagctttcctcaccaaacgagagacggcctctacaatcatcaaaaagatactagaagaaatcttccccaggtctggaatgcccaaggtaatctggtcagacaacggccctactctcattgccaaggtaagccagggtgtggccaaatatttagaggtcgattagaaattacattgtatttacagacctcaaagttcaagacaggtagagtaaataaatagaactctaaaagagaccctaaacaaattgaccatggagactggcacagactgggtgacactccttccctcttgctctcttcagagcaagaaataccccttccagattcagccttaccccctttgagatattatatggggcctcagctcccctgactgtattagatgatgttactgaaccaacttgtcatagtgccatagtaataatgatttgtgtgccaggctaaaagacctacaggtgatacagaaagaaatctgctcacagctgacaacagcctatgccccggagacccctgagacatcccatcagttccaggtcggaagcagctacactgagcccagacactcgagcctcgctggaaaagaccgtacctggtgctgctgaccaccctgacagccgtcaattctcagccctcaccagccatatactagctgttagggctgagagctgggacctagagggaaattcagtcatgtttgtcctgggttccatcgagataggtgtggagataggcttaatttctattacaaatgatgtaacattacatatgttagtactcctaacacttcttgggattgtgcctcagggatcacaacctatataagtttagaagttctgaaagacagtcatgaccttggtgtataggtttagatagtgtccagatagaatcctgatgccaaagactttttagctgacctccaagaatacctaacctccctctcagaggtagtccttcaaaataagaaaagattagacctgatattccttaaaaaaggagtctgtgtgctatactgaaagaaaaatgttgcttctatacagaccattcaagagtaattaaggactccataaataaacttaaaaaagggttagacaaagacagacagaaaaacacataagagatggtttgagagctagtttagtagatctccctggatgactactctacactctgctacagctgggccattattaataattttcttggttttagtttttggctcctgcgtgacaaacaggttaattgcttttgttaaaaattgagtgggtgctgtgcggttgatggttgtgagacaacagtaccagtcagttaggacaactggtgagaccaaataagacttgatatcaaaattctaagattagaattatttaataggagaagacgggaataaaaagaaaattatacgaattctaggtttataaatataaaaattaaaagaataaaccccaaaaggccacagacccagggctaagccctgcagccaggactagcaggccataaagataaaggagcacaggaaacactgttcaggcaggactgacaagccataaagaaaaggaatgcaggaaccagcctgagttaatgggactgattcatgggacgtctggcaggaagacatctccccccagctcactgagggccatcctccggcccctgataaacccctgacttctagcacgtactctttctgctttgttctcactgctatgtttgaatgagccaattgtatgtaaccacgccaaaaccccctagccttctctatataaccctctgacttttgagtttcggggtcgacacctctgtctcctgcgcgggatacgtgtcggcccggagatctctgtaataggtctccgtaataaacctcgcctttgcttattacatcc

SEQ ID NO: 198 - DNA, 704 bp, Rattus norvegicus
  CDS (44)..(451)
cgccaccgcgtctccttgctgcttttgtgctctcccgctcgccatggccagccttaaggacctggaagggaagtggcgtctggtggaaagccacgggtttgaggactacatgaaggaactaggagtagggctggctcttaggaagatgggtgccatggccaaaccagactgcatcattaccctcgacggcaacaacctcaccgtcaaaactgagagcacggtgaagacgaccgtgttttcttgcaccttgggagagaagtttgatgaaaccacagctgatggcaggaaaactgagacggtctgcaccttcacagacggtgccctggtccagcaccagaagtgggaagggaaagaaagcacgataacgagaaaactgaaggacgggaagatggtcgtcgagtgcgtcatgaacaatgccatctgtactcgggtctatgagaaggtacaatgaggactggctaactcgtcatcctggacagcagtcagctggctgagggaataagctcaattcaatgagcaggtcgtacagaaccacactgcttcacttctttggttttatttttcatgacttttcatcatagacactttacccgaaacccatgtcagaccgttggtttacccaggatcattcctttggttagtaaataaatgcgtttgtgctaaaaaaaaaaaaaaaaaaaaaaaaaaaaaaaaaaaaaaaaaaa

SEQ ID NO: 199 - protein, 135 aa, Rattus norvegicus
MASLKDLEGKWRLVESHGFEDYMKELGVGLALRKMGAMAKPDCIITLDGNNLTVKTESTVKTTVFSCTLGEKFDETTADGRKTETVCTFTDGALVQHQKWEGKESTITRKLKDGKMVVECVMNNAICTRVYEKVQ

SEQ ID NO: 200 - DNA, 664 bp, Rattus norvegicus
  CDS (42)..(449)
ggcacgagtctccttgctgcttttgtgctctcccgctcgccatggccagccttaaggacctggaagggaagtggcgtctggtggaaagccacgggtttgaggactacatgaaggaactaggagtagggctggctcttaggaagatgggtgccatggccaaaccagactgcatcattaccctcgacaacaacaacctcaccgtcaaaactgagagcacagtgaagacgaccgtgttttcttgcaccttgggagagaagtttgatgaaaccacagctgatggcaggaaaactgagacggtctgcaccttcacagacggtgccctggtccagcaccagaagtgggaagggaaagaaagcacgataacgagaaaactgaaggacgggaagatggtggtggagtgcgtcatgaacaatgccatctgtactcgggtctatgagaaggtacaatgaggactggctaactcgtcatcctggacagcagtcagctggctgagggaatagctcaattcaatgagcaggtcgtacagaaccacactgcttcacttctttggttttatttttcatgacttttcatcatagacactttacccgaaacccatgtcagaccgttggtttacccaggatcattcctttggttagtaaataaatgcgtttgtgctaattca

SEQ ID NO: 201 - protein, 135 aa, Rattus norvegicus
MASLKDLEGKWRLVESHGFEDYMKELGVGLALRKMGAMAKPDCIITLDNNNLTVKTESTVKTTVFSCTLGEKFDETTADGRKTETVCTFTDGALVQHQKWEGKESTITRKLKDGKMVVECVMNNAICTRVYEKVQ

SEQ ID NO: 202 - DNA, 695 bp, Rattus norvegicus
  CDS (59)..(466)
aaggaacagcgcccccgccaccgcgtctccttgctgcttttgtgctctcccgctcgccatggccagccttaaggacctggaagggaagtggcgtctggtggaaagccacgggtttgaggactacatgaaggaactaggagtagggctggctcttaggaagatgggtgccatggccaaaccagactgcatcattaccctcgacggcaacaacctcaccgtcaaaactgagagcacggtgaagacgaccgtgttttcttgcaccttgggagagaagtttgatgaaaccacagctgatggcaggaaaactgagacggtctgcaccttcacagacggtgccctggtccagcaccagaagtgggaagggaaagaaagcacgataacgagaaaactgaatgacgggaagatggtggtggagtgcgtcatgaacaatgccatctgtactcgggtctatgagaaggtacaatgaggactggcttactcgtcatcctggacagcagtcagctggctgagggaataagctcaattcaatgagcaggtcgtacagaaccacactgcttcacttctttggttttatttttcatgacttttcatcatagacactttacccgaaacccatgtcagaccgttggtttacccaggatcattcctttggttagtaaataaatgcgtttgtgctaattcaaaaaaaaaaaaaa

SEQ ID NO: 203 - protein, 135 aa, Rattus norvegicus
MASLKDLEGKWRLVESHGFEDYMKELGVGLALRKMGAMAKPDCIITLDGNNLTVKTESTVKTTVFSCTLGEKFDETTADGRKTETVCTFTDGALVQHQKWEGKESTITRKLNDGKMVVECVMNNAICTRVYEKVQ

SEQ ID NO: 204 - DNA, 1004 bp, Mus musculus
  CDS (71)..(916)
gctctcctttgcagtcctgagctcgcagttccaggttttggttgctgcgtccttggctggcgtcagaaaaatggctacaaactttctagcgcatgagaagatctggtttgacaagtttaaatatgatgatgcagaaaggagattctatgagcagatgaacgggcctgtgacctccggctcccgccaggagaatggtgccagcgtgatcctccgagacattgcaagagccagagagaacatccagaaatccttggctggaagctcaggccctggagcctccagtggacctggtggagaccacagtgagctcattgtgaggattaccagtctggaagtggagaaccagaaccttcgaggcgtggtgcaagatttgcagcaggccatttccaagttggaggcccggctgagctctctagagaagagttcacctactccccgagccacggccccacagacccaacatgtctctcctatgcgtcaagtggagcccccaaccaagaaaggagccacaccagcagaggacgatgaggacaaggacattgacctgttcggcagtgacgaggaggaagaagataaggaggctgcccgactacgggaggagaggctacgccagtacgcagagaagaaggccaagaagcccacactggtggccaaatcctccatccttttggatgttaaaccttgggatgatgagactgacatggcccagctagagacttgtgtgcgttccatccaattggacgggctggtttggggggcctccaagcttgtgcctgttggctatggcatccggaagctgcagatccagtgtgtggtggaggatgacaaagtgggcaccgacttgctcgaggaggagatcaccaaatttgaggagcatgtgcagagtgtcgacatcgcagctttcgacaagatctgaatgtccgagagagtgtggtttcatgtgtgtgaggacctgctgagattaaagactgagactcaacacaaaaaaaaaaaaaaaaaaaaaa

SEQ ID NO: 205 - protein, 281 aa, Mus musculus
MATNFLAHEKIWFDKFKYDDAERRFYEQMNGPVTSGSRQENGASVILRDIARARENIQKSLAGSSGPGASSGPGGDHSELIVRITSLEVENQNLRGVVQDLQQAISKLEARLSSLEKSSPTPRATAPQTQHVSPMRQVEPPTKKGATPAEDDEDKDIDLFGSDEEEEDKEAARLREERLRQYAEKKAKKPTLVAKSSILLDVKPWDDETDMAQLETCVRSIQLDGLVWGASKLVPVGYGIRKLQIQCVVEDDKVGTDLLEEEITKFEEHVQSVDIAAFDKI

SEQ ID NO: 206 - DNA, 857 bp, Mus musculus
  CDS (94)..(771)
tttttttttttttttttttccctcagcgctggccgcggcctcccggcgctctcgtcctccgcttttgcacagctccccgttccagccttcgccatgggattcggagacctgaaaacccctgccggcctccaggtgctcaacgattacctggcggacaagagctacattgaggggtacgtgccatcacaagcagacgtggcagtatttgaagcagtttctggtccaccacctgctgacctgtgtcatgccctacgttggtataatcacatcaagtcgtatgaaaaagaaaaggccagcctgccgggagtgaagaaatctttgggcaagtatggccctagcagtgtagaagacaccacaggaagtggagctgcagatgctaaggatgatgacgacattgatctctttggatctgatgatgaggaggaaagtgaggaagcaaagaagctacgagaagaacgccttgcacagtatgagtccaagaaagctaaaaagcctgcagttgttgcgaagtcttccatcctactagacgtgaagccttgggatgatgagacggacatgacaaaactagaggagtgtgtccgaagcattcaagcagatggcctggtgtggggctcctctaaattggttccagtgggatatggaattaaaaagcttcaaatacagtgtgtagttgaagatgataaggttggaacggatatgctggaagagcaaattactgcttttgaggactacgtacagtccatggatgtggctgcttttaacaagatttaaatcattcttaagtcagtgcacttaaataaaagcttgaaagataaaaaaaaaaaaaaaaaaaaaaaaaaaaaaaaaaaaaaaaaaaa

SEQ ID NO: 207 - protein, 225 aa, Mus musculus
MGFGDLKTPAGLQVLNDYLADKSYIEGYVPSQADVAVFEAVSGPPPADLCHALRWYNHIKSYEKEKASLPGVKKSLGKYGPSSVEDTTGSGAADAKDDDDIDLFGSDDEEESEEAKKLREERLAQYESKKAKKPAVVAKSSILLDVKPWDDETDMTKLEECVRSIQADGLVWGSSKLVPVGYGIKKLQIQCVVEDDKVGTDMLEEQITAFEDYVQSMDVAAFNKI

SEQ ID NO: 208 - DNA, 1722 bp, Mus musculus
  CDS (1)..(225)
gcaggtgttgtgaaaaccaccgctaattcaaagcaaaaatgggaaaggaaaagactcacatcaacatcgtcgtaatcggacacgtagattccggcaagtccaccacaaccggccacctgatctacaaatgtggtggaatcgacaagcgaaccatcgaaaagtttgagaaggaggctgctgagatgggaaagggctccttcaagtacgcctgggtcttagacaaactgaaagctgagcgtgagcgtggtatcactattgacatctccctgtggaaattcgagaccagcaaatactatgtgaccatcattgatgccccaggacacagagacttcatcaaaaacatgattacaggcacatcccaggctgactgtgctgtcctgattgttgctgctggtgttggtgaatttgaagctggtatctccaagaacgggcagacccgcgagcatgctcttctggcttacaccctgggtgtgaaatagctgattgttggtgtcaacaaaatggattccaccgagccaccatacagtcagaagagatacgaggaaatcgttaaggaagtcagcacctacattaagaaaattggctacaaccctgacacagtagcatttgtgccaatttctggttggaatggtgacaacatgctggagccaagtgctaatatgccttggttcaagggatggaaagtcacccgcaaagatggcagtgccagtggcaccacgctgctggaagctttggattgtatcctaccaccaactcgtccaactgacaagcccctgcgactgcccctccaggatgtctataaaattggaggcattggcactgtccctgtgggccgagtggagactggtgttctcaagcctggcatggtggttacctttgctccagtcaatgtaacaactgaagtcaagtctgttgaaatgcaccatgaagctttgagtgaagctcttcctggggacaatgtgggcttcaatgtaaagaacgtgtcggtcaaagatgttagacgaggcaatgttgctggtgacagcaaaaacgacccaccaatggaagcagctggcttcactgctcaggtgattatcctgaaccatccaggccaaatcagtgctggctacgctcctgttctggattgtcacacagcccacatagcatgcaagtttgctgagcttaaagaaaagatcgatcgtcgttctggtaagaagctggaagatggccccaagttcctgaagtctggcgatgctgccattgttgatatggtccctggcaagcccatgtgtgttgagagcttctctgactaccctccacttggtcgctttgctgttcgtgacatgaggcagacagttgctgtgggtgtcatcaaagctgtggacaagaaggctgctggagctggcaaagtcaccaagtctgcccagaaagctcagaaggctaaatgaatattacccctaacacctgccaccccagtcttaatcagtggtggaagaacggtctcagaactgtttgtctcaattggccatttaagtttaatagtaaaagactggttaatgataacaatgcatcgtaaaaccttcagaaggaaagaatgttgtggaccattttttttgtgtgtggcagttttaagttattagttttcaaaatcagtactttttaatggaaacaacttgaccaaaaatctgtcacagaattttgagaccattaaaacaagtttaatgagaaaaaaaaaaaaaaaaa

SEQ ID NO: 209 - protein, 24 aa, Mus musculus
AGVVKTTANSKQKWERKRLTSTSS

SEQ ID NO: 210 - protein, 10 aa, Mus musculus
IPASPPQPAT

SEQ ID NO: 211 - protein, 32 aa, Mus musculus
STNVVESTSEPSKSLRRRLLRWERAPSSTPGS

SEQ ID NO: 212 - DNA, 965 bp, Mus musculus
  CDS (53)..(883)
cctgagctcgcagttccaggttttggttgctgcgtccttggctggcgtaaaaatggctacaaactttctagcgcatgagaagatctggtttgacaagtttaaatatgatgatgcagaaaggagattctatgagcagatgaacgggcctgtgacctccggctcccgccagctcaaggtgatgctgcccaactcccctgaggccctgggccaggccacccctgggactagctcaggccctggagcctccagtggacctggtggagaccacagtgagctcattgtgaggattaccagtctggaagtggagaaccagaaccttcgaggcgtggtgcaagatttgcagcaggccatttccaagttggaggcccggctgagctctctagagaagagttcacctactccccgagccacggccccacagacccaacatgtctctcctatgcgtcaagtggagcccccaaccaagaaaggagccacaccagcagaggacgatgaggacaaggacattgacctgttcggcagtgacgaggaggaagaagataaggaggctgcccgactacgggaggagaggctacgccagtacgcagagaagaaggccaagaagcccacactggtggccaaatcctccatccttttggatgttaaaccttgggatgatgagactgacatggcccagctagagacttgtgtgcgttccatccaattggacgggctggtttggggggcctccaagcttgtgcctgttggctatggcatccggaagctgcagatccagtgtgtggtggaggatgacaaagtgggcaccgacttgctcgaggaggagatcaccaaatttgaggagcatgtgcagagtgtcgacatcgcagctttcaacaagatctgaatgtccgagagagtgtggtttcatgtgtgtgaggacctgctgagattaaagactgagactctgaaaaaaaaaaaaaaaaaaa

SEQ ID NO: 213 - protein, 276 aa, Mus musculus
MATNFLAHEKIWFDKFKYDDAERRFYEQMNGPVTSGSRQLKVMLPNSPEALGQATPGTSSGPGASSGPGGDHSELIVRITSLEVENQNLRGVVQDLQQAISKLEARLSSLEKSSPTPRATAPQTQHVSPMRQVEPPTKKGATPAEDDEDKDIDLFGSDEEEEDKEAARLREERLRQYAEKKAKKPTLVAKSSILLDVKPWDDETDMAQLETCVRSIQLDGLVWGASKLVPVGYGIRKLQIQCVVEDDKVGTDLLEEEITKFEEHVQSVDIAAFNKI

SEQ ID NO: 214 - DNA, 1417 bp, Rattus norvegicus
  CDS (18)..(1310)
agagggaacctttaatcatgaagctaattactatcctgctcctctgctccaggctcctgccaagtttagcgcaggaagaaggcgcccaggaattgaactgcaatgatgagactgtatttcaggctgtggatactgctctgaagaaatataacgctgagttagaaagcggcaaccagtttgtgttgtaccgagtgactaagggcactaagaaggatggcgctgaaacattgtattccttcaagtatcaaatcaaggagggcaactgctctgttcagagtggcctcacctggcaggactgtgacttcaaggacgctgaggaagccgctactggcgaatgcacaacaactttggggaagaaagaaaataaattctccgtagccacccagatctgcaatattactccaggtaagggtcctaagaagacagaggaggacctctgtgtcgggtgtttccaacccataccgatggatagctcagacctgaagcctgttctgaaacacgctgtggagcattccaacaacaacacgaagcacacccacctctttgctctcagagaagtaaagagtgcccactcacaggtggtggctggcatgaattataaaattatctactccattgtgcaaacaaattgttcaaaggaggattttccttccctccgtgaagactgtgtaccccttccctatggcgatcatggtgagtgtacgggtcatacccacgtggatattcataacacaattgccggcttctcacagagctgtgacctttatccaggagatgatttgtttgaactacttcccaagaattgccgtggctgccccagggagatacctgtagacagcccggagctgaaggaggcacttggtcattccattgcacagcttaatgcacagcataaccatattttctatttcaagattgacaccgtgaaaaaggcaacatcacaggtggttgctggagtaatatatgtgattgagttcatagccagagaaactaactgttccaagcaaagtaaaacagaactgacagcggattgtgagaccaaacacctcggtcaaagcctcaactgcaatgctaacgtgtacatgagaccttgggagaacaaagtcgtcccgactgtcagatgccaagcactagatatgatgatttctaggcctccaggattttcacctttccggctggtgcgagtacaagaaactaaagaaggaacaactaggctcctaaactcatgtgagtacaagggcagactctcaaaggcaagggcaggcccagcacctgaccatcaggcagaagcttcaaccgtgacatcatagcctggcaaagacccggagtggaaggaccagaagactcctgggatgtgtgcagtatggaagcatgtttcttcatcacctgatcctgggtgaaataaagttcagactcg

SEQ ID NO: 215 - protein, 430 aa, Rattus norvegicus
MKLITILLLCSRLLPSLAQEEGAQELNCNDETVFQAVDTALKKYNAELESGNQFVLYRVTKGTKKDGAETLYSFKYQIKEGNCSVQSGLTWQDCDFKDAEEAATGECTTTLGKKENKFSVATQICNITPGKGPKKTEEDLCVGCFQPIPMDSSDLKPVLKHAVEHSNNNTKHTHLFALREVKSAHSQVVAGMNYKIIYSIVQTNCSKEDFPSLREDCVPLPYGDHGECTGHTHVDIHNTIAGFSQSCDLYPGDDLFELLPKNCRGCPREIPVDSPELKEALGHSIAQLNAQHNHIFYFKIDTVKKATSQVVAGVIYVIEFIARETNCSKQSKTELTADCETKHLGQSLNCNANVYMRPWENKVVPTVRCQALDMMISRPPGFSPFRLVRVQETKEGTTRLLNSCEYKGRLSKARAGPAPDHQAEASTVTS

SEQ ID NO: 216 - DNA, 1390 bp, Rattus norvegicus
  CDS (1)..(1275)
gtgctcctctgctccaggctcctgccaagtttagcgcaggaagaaggcgcccaggaattgaactgcaatgatgagactgtatttcaggctgtggatactgctctgaagaaatataacgctgagttagaaagcggcaaccagtttgtgttgtaccgagtgactgagggcactaagaaggatggcgctgaaacattgtattccttcaagtatcaaatcaaggagggcaactgctctgttcagagtggcctcacctggcaggactgtgacttcaaggacgctgaggaagccgctactggcgaatgcacaacaactttggggaagaaagaaaataaattctccgtagccacccagatctgcaatattactccaggtaagggtcctaagaagacagaggaggacctctgtgtcgggtgtttccaacccataccgatggatagctcagacctgaagcctgttctgaaacacgctgtggagcatttcaacaacaacacgaagcacacccacctctttgctctcagagaagtaaagagtgcccactcacaggtggtggctggcatgaattataaaattatctactccattgtgcaaacaaattgttcaaaggaggattttccttccctccatgaagactgtgtaccccttccctatggcgatcatggtgagtgtacgggtcatacccacgtggatattcataacacaattgccggcttctcacagagctgtgacctttatccaggagatgatttgtttgaactacttcccaagaattgccgtggctgccccagggagatacctgtagacagcccggagctgaaggaggcacttggtcattccattgcgagacttaatgcacagcataaccatattttctatttcaagattgacaccgtgaaaaaggcaacatcacaggtggttgctggagtaatatatgtgattgagttcatagccagagaaactaactgttccaagcaaagtaaaacagaactgacagcggattgtgagaccaaacacctcggtcaaagcctcaactgcaatgctaacgtgtacatgagaccttgggagaacaaagtcgtcccgactgtcagatgccaagcactagatatgatgatttctaggcctccaggattttcacctttccggctggtgcgagtacaagaaactaaagaaggaacgactaggctcctaaactcatgtgagtacaagggcagactctcaaaggcaggggcaggcccagcacctgagcgtcaggcagaagcttcaaccgtgacaccatagcccggcaaagacccggagtggaaggaccagaagactcctgggatgtgtgcagcatggaagcatgtttcttcatcacctgatcctgggtgaaataaagttcagactcgacgagttc

SEQ ID NO: 217 - protein, 424 aa, Rattus norvegicus
VLLCSRLLPSLAQEEGAQELNCNDETVFQAVDTALKKYNAELESGNQFVLYRVTEGTKKDGAETLYSFKYQIKEGNCSVQSGLTWQDCDFKDAEEAATGECTTTLGKKENKFSVATQICNITPGKGPKKTEEDLCVGCFQPIPMDSSDLKPVLKHAVEHFNNNTKHTHLFALREVKSAHSQVVAGMNYKIIYSIVQTNCSKEDFPSLHEDCVPLPYGDHGECTGHTHVDIHNTIAGFSQSCDLYPGDDLFELLPKNCRGCPREIPVDSPELKEALGHSIARLNAQHNHIFYFKIDTVKKATSQVVAGVIYVIEFIARETNCSKQSKTELTADCETKHLGQSLNCNANVYMRPWENKVVPTVRCQALDMMISRPPGFSPFRLVRVQETKEGTTRLLNSCEYKGRLSKAGAGPAPERQAEASTVTP

SEQ ID NO: 218 - DNA, 1389 bp, Rattus norvegicus
  CDS (1)..(1275)
tgctcctctgctccaggctcctgccaagtttagcgcaggaagaaggcgcccaggaattgaactgcaatgatgagactgtatttcaggctgtggatactgctctgaagaaatataacgctgagttagaaagcggcaaccagtttgtgttgtaccgagtgactgagggcactaagaaggatggcgctgaaacattgtattccttcaagtatcaaatcaaggagggcaactgctctgttcagagtggcctcacctggcaggactgtgacttcaaggacgctgaggaagccgctactggcgaatgcacaacaactttggggaagaaagaaaataaattctccgtagccacccagatctgcaatattactccaggtaagggtcctaagaagacagaggaggacctctgtgtcgggtgtttccaacccataccgatggatagctcagacctgaagcctgttctgaaacacgctgtggagcatttcaacaacaacacgaagcacacccacctctttgctctcagagaagtaaagagtgcccactcacaggtggtggctggcatgaattataaaattatctactccattgtgcaaacaaattgttcaaaggaggattttccttccctccatgaagactgtgtaccccttccctatggcgatcatggtgagtgtacgggtcatacccacgtggatattcataacacaattgccggcttctcacagagctgtgacctttatccaggagatgatttgtttgaactacttcccaagaattgccgtggctgccccagggagatacctgtagacagcccggagctgaaggaggcacttggtcattccattgcgagacttaatgcacagcataaccatattttctatttcaagattgacaccgtgaaaaaggcaacatcacaggtggttgctggagtaatatatgtgattgagttcatagccagagaaactaactgttccaagcaaagtaaaacagaactgacagcggattgtgagaccaaacacctcggtcaaagcctcaactgcaatgctaacgtgtacatgagaccttgggagaacaaagtcgtcccgactgtcagatgccaagcactagatatgatgatttctaggcctccaggattttcacctttccggctggtgcgagtacaagaaactaaagaaggaacgactaggctcctaaactcatgtgagtacaagggcagactctcaaaggcaggggcaggcccagcacctgagcgtcaggcagaagcttcaaccgtgacaccatagcccggcaaagacccggagtggaaggaccagaagactcctgggatgtgtgcagcatggaagcatgtttcttcatcacctgatcctgggtgaaataaagttcagactcgacgagttc

SEQ ID NO: 219 - protein, 10 aa, Rattus norvegicus
CSSAPGSCQV

SEQ ID NO: 220 - protein, 8 aa, Rattus norvegicus
RRKKAPRN

SEQ ID NO: 221 - protein, 14 aa, Rattus norvegicus
TAMMRLYFRLWILL

SEQ ID NO: 222 - protein, 6 aa, Rattus norvegicus
RNITLS

SEQ ID NO: 223 - protein, 10 aa, Rattus norvegicus
KAATSLCCTE

SEQ ID NO: 224 - protein, 60 aa, Rattus norvegicus
LRALRRMALKHCIPSSIKSRRATALFRVASPGRTVTSRTLRKPLLANAQQLWGRKKINSP

SEQ ID NO: 225 - protein, 34 aa, Rattus norvegicus
PPRSAILLQVRVLRRQRRTSVSGVSNPYRWIAQT

SEQ ID NO: 226 - protein, 21 aa, Rattus norvegicus
NTLWSISTTTRSTPTSLLSEK

SEQ ID NO: 227 - protein, 10 aa, Rattus norvegicus
RVPTHRWWLA

SEQ ID NO: 228 - protein, 79 aa, Rattus norvegicus
IIKLSTPLCKQIVQRRIFLPSMKTVYPFPMAIMVSVRVIPTWIFITQLPASHRAVTFIQEMICLNYFPRIAVAAPGRYL

SEQ ID NO: 229 - protein, 4 aa, Rattus norvegicus
TARS

SEQ ID NO: 230 - protein, 25 aa, Rattus norvegicus
RRHLVIPLRDLMHSITIFSISRLTP

SEQ ID NO: 231 - protein, 10 aa, Rattus norvegicus
KRQHHRWLLE

SEQ ID NO: 232 - protein, 13 aa, Rattus norvegicus
PEKLTVPSKVKQN

SEQ ID NO: 233 - protein, 20 aa, Rattus norvegicus
QRIVRPNTSVKASTAMLTCT

SEQ ID NO: 234 - protein, 15 aa, Rattus norvegicus
DLGRTKSSRLSDAKH

SEQ ID NO: 235 - protein, 25 aa, Rattus norvegicus
FLGLQDFHLSGWCEYKKLKKERLGS

SEQ ID NO: 236 - protein, 26 aa, Rattus norvegicus
THVSTRADSQRQGQAQHLSVRQKLQP

SEQ ID NO: 237 - DNA, 2780 bp, Rattus norvegicus
  CDS (278)..(326)
  CDS (603)..(729)
  CDS (1405)..(2401)
  misc_feature (2651)..(2651): N
caacatacaacaagacagctccccgaggctgcctgtgtgctgtcagcatccacgttgtcttggggtcattaaagtccaagaggcctcctggagtgtgtcaccttccaacgtggagtcacactggggaggaggcggggagagaaggctggaggggctttaaatgagtggctggccttgcctgccgtcaatcctcacagcgacacagtgaaccatttcttctgacgctaggaaacatccagtgtagctgaggctgtcccaacccagtgaggagcccaggatgttcctgaaggctgtggtgctgaccgtggccctggtggccatcaccggtgagtagacactgctctccagcagttgtagttcatcgagaggctagccagaaaagccagctctagaactcgtggacagctcagggtggccttgcgtttgccagcggctcacaaggactttgttctccctggcacctgtgctccctgagttatcccagggatggggaaatgggttgcactatcccaactccaacatcatccagttcagagctgaggcggagggaccaggagagagatgcatcttcataaatcacttgccttctgctctctgcccagggacccaggctgaggtcacttccgaccaggtggccaatgtgatgtgggactacttcacccagctaagcaacaatgccaaggaggctgtggaacaactgcagaagacagatgtcactcaacagctcaagtaagtgggatcagactgcgaggctaggccttcttgaagcccatagctgacctcagagatgggacactggcaagatgggacatcagagtcttgcctctccagacctagatcctgcctataaacagggaagctggacccagggacccatccctgtagtaccttcctatctgcatgtgctagcgtttggtaacccatcaccaactcttggtagaaagaggagagagacatgtcccataaggacacgaggtgcctgtgcaatcagggggagggaggctgggatgtttggggaccctctgagcacatgcaaagacatcagaccccgtgccactggaagacatgtgttgcacaatgtgatcctgtgctgggagggatgtcaaagtccagtcccattctttattccacaggaaaggaaaacaaagttctcaagtcacatggtgggcagataaggatacagaggctcagcagaagccttgcagataaaacctccaaagtcgaacctaatcctaagagatttcctgaaagcatggtccattcctggggggggggggtggctacagggacaagatggaggcctctgttcctgaggactcactcctgacctaggcaggtgtataaagctgagtgttctacaagtgtatctaatggtgcttccttctctctgttctttccttgaagtaccctcttccaggacaaacttgggaacattaacacctatgccgatgacctgcagaacaagctggtgcccttcgccgttcaactgagtggacatctaaccaaggaaacagagagggtgagggaagagatccagaaggagctcgaggacctacgggccaacatgatgccccatgccaacaaagtgagccagatgttcggggacaacgtgcagaagttgcaggaacacctgaggccctatgccacggacctgcaagctcagatcaacgcacagacccaggatatgaaacgccagctgaccccctacatccagcgcatgcagaccacaatacaagacaatgtggaaaacctgcagtcctccatggtgccctttgccaacgagctaaaggaaaagtttaaccagaatatggaagggctcaaggggcaactaaccccccgtgccaacgagctgaaggccacgatcgaccagaacctggaagacctgcgcagcagactggcccctctcgcggagggtgtgcaggaaaaactcaaccatcagatggaaggcttggccttccagatgaagaagaacgctgaggagctccagaccaaggtctccacaaatatcgaccagctgcagaagaatctggccccgctggtggaagatgtgcaaagcaagctgaaaggcaacacggaaggactgcagaagtctctggaagacctgaacaagcagctggaccagcaggtggaggtgttccggcgtgctgtggagcccctgggggataagttcaacatggctctggtgcagcagatggagaagttcaggcagcagctgggctccgattcgggggacgtggaaagccacttgagcttcctggagaagaacctgagggaaaaggtcagctcctttatgagcaccctgcaaaaaaaggggagcccagaccagcccctagccctccccctcccggagcaggttcaggaacaggtccaggagcaggtgcagcccaaacctctggagagctgagctgtccctgtgtcctcggcccatcacagcagcagacacctgccctgccccaccacctgtctgtcactctgttcccaagcacttctcgtaccagcttgaggacacatgtcctgtgggtgacgatacctcctctcgttactcaataaagcatctgagaaattaaccctgttgggtcgccgtatgattccttgggggcctggcctgaggtggggaggaaattgatgcttgcaaagccgggcagtatcanatgtggactgggggacataggggtggggcaggcaacgagcctgcgggtggatcagggggttggcgtgctagagaggcgaacacagaaaagatgcccctctatcaaaaaacaaaacacacatcccactta

SEQ ID NO: 238 - protein, 391 aa, Rattus norvegicus
MFLKAVVLTVALVAITGTQAEVTSDQVANVMWDYFTQLSNNAKEAVEQLQKTDVTQQLNTLFQDKLGNINTYADDLQNKLVPFAVQLSGHLTKETERVREEIQKELEDLRANMMPHANKVSQMFGDNVQKLQEHLRPYATDLQAQINAQTQDMKRQLTPYIQRMQTTIQDNVENLQSSMVPFANELKEKFNQNMEGLKGQLTPRANELKATIDQNLEDLRSRLAPLAEGVQEKLNHQMEGLAFQMKKNAEELQTKVSTNIDQLQKNLAPLVEDVQSKLKGNTEGLQKSLEDLNKQLDQQVEVFRRAVEPLGDKFNMALVQQMEKFRQQLGSDSGDVESHLSFLEKNLREKVSSFMSTLQKKGSPDQPLALPLPEQVQEQVQEQVQPKPLES

SEQ ID NO: 239 - DNA, 2851 bp, Rattus norvegicus
  CDS (485)..(534)
  CDS (812)..(937)
  CDS (1611)..(2607)
aatataacaaactaccgtgtcgaaaggagaaacttcgaggcttcagataactagactgaggtgacccggcttgaccgccatgaaacacaaagcacatttatgattaactccttgatcctgggtctgctcaagggactcccctagctctcaggctggtcctcctgaagcttctggccatccttcccagcttcttgtacagggcggagccaactcaacaagacagctccccgaggctgcctgtgtgctgtcagcatccacgttgtcttggggtcattaaagtccaagaggcctcctgggagtgtgtcaccttccaacgtggagtcacactggggaggaggcggggagagaaggctggaggggctttaaatgagtggctggccttgcctgccgtcaatcctcacagcgacacaggtgaaccatttcttctgacgctaggaaacatccagtgtagctgaggctgtcccaacccagtgaggagcccaggatgttcctgaaggctgtggtgctgaccgtggccctggtggccatcaccgggtgagtagaacactgctctccagcagttgtagttcatagaggcagccagaaaaagccagctctagaactcgtggacagctcagggtggccttgcgtttgcccagcggctcacaagggactttgttctccctggcacctgtgctccctgagttatcccagggatggggaaatgggttgcactatcccaactccaacatcatccagttcagagctgaggcggagggaccaggagagagatgcatcttcataaatcacttgccttctgctctctgcccaggacccaggctgaggtcacttccgaccaggtggccaatgtgatgtgggactacttcacccagctaagcaacaatgccaaggaggctgtggaacaactgcagaagacagatgtcactcaacagctcaagtaagtgggatcagactgcgaggctaggccttcttgaagcccatagctgacctcagagatgggacactggcaagatgggacatcagagtcttgcctctccagacctagatcctgcctataaacagggaagctggacccagggacccatccctgtagtaccttcctatctgcatgtgctagcgtttggtaacccatcaccaactcttggtagaaagaggagagagacatgtcccataaggacacgaggtgcctgtgcaatcagggggagggaggctgggatgtttggggaccctctgagcacatgcaaagacatcagaccccgtgccactggaagacatgtgttgcacaatgtgattcctgtgctgggagggatgtcaaagtccacgtcccattctttatccacaggaaaggaaaacaaagttctcaagtcacatgatgggcagataaggatacagaggctcagcagaagccttgcagataaaactccaaagtcgaactaatcctaagagatttcctgaaagcatggtccatcctggggggggggggtggctacagggacaagatggaggcctctgttcctgaggactcactcctgacctaggcaggtgtataaagctgagtgttctacaagtgtatctaatggtgcttccttctctctgttctttccttgaagtaccctcttccaggacaaacttgggaacattaacacctatgccgatgacctgcagaacaagctggtgcccttcgccgttcaactgagtggacatctaaccaaggaaacagagagggtgagggaagagatccagaaggagctcgaggacctacgggccaacatgatgccccatgccaacaaagtgagccagatgttcggggacaacgtgcagaagttgcaggaacacctgaggccctatgccacggacctgcaagctcagatcaacgcacagacccaggatatgaaacgccagctgaccccctacatccagcgcatgcagaccacaatacaagacaatgtggaaaacctgcagtcctccatggtgccctttgccaacgagctaaaggaaaagtttaaccagaatatggaagggctcaaggggcaactaaccccccgtgccaacgagctgaaggccacgatcgaccagaacctggaagacctgcgcagcagactggcccctctcgcggagggtgtgcaggaaaaactcaaccatcagatggaaggcttggccttccagatgaagaagaacgctgaggagctccagaccaaggtctccacaaatatcgaccagctgcagaagaatctggccccgctggtggaagatgtgcaaagcaagctgaaaggcaacacggaaggactgcagaagtctctggaagacctgaacaagcagctggaccagcaggtggaggtgttccggcgtgctgtggagcccctgggggataagttcaacatggctctggtgcagcagatggagaagttcaggcagcagctgggctccgattcgggggacgtggaaagccacttgagcttcctggagaagaacctgagggaaaaggtcagctcctttatgagcaccctgcaaaaaaaggggagcccagaccagcccctagccctccccctcccggagcaggttcaggaacaggtccaggagcaggtgcagcccaaacctctggagagctgagctgtccctggtgtcctcggcccatcacagcagcagacacctgccctgccccaccacctgtctgtcactctgttcccaagcacttctcgtaccagcttgaggacacatgtcctgtgggtgacgatacctcctctcgttactcaataaagcatctgagaaattaaccctgttgggtcgccgtatgattccttgggggcctggcctgaggtggggaggaaattgatgcttggcaaagccgggc

SEQ ID NO: 240 - protein, 391 aa, Rattus norvegicus; identical to SEQ ID NO: 238

SEQ ID NO: 241 - DNA, 1423 bp, Rattus norvegicus
  CDS (92)..(1267)
aatcctcacagcgacacagtgaaccatttcttctgacgctaggaaacatccagtgtagctgaggctgtcccaacccagtgaggagcccaggatgttcctgaaggctgtggtgctgaccgtggccctggtggccatcaccgggacccaggctgaggtcacttccgaccaggtggccaatgtgatgtgggactacttcacccagctaagcaacaatgccaaggaggctgtggaacaactgcagaagacagatgtcactcaacagctcaataccctcttccaggacaaacttgggaacattaacacctatgccgatgacctgcagaacaagctggtgcccttcgccgttcaactgagtggacatctaaccaaggaaacagagagggtgagggaagagatccagaaggagctcgaggacctacgggccaacatgatgccccatgccaacaaagtgagccagatgttcggggacaacgtgcagaagttgcaggaacacctgaggccctatgccacggacctgcaagctcagatcaacgcacagacccaggatatgaaacgccagctgaccccctacatccagcgcatgcagaccacaatacaagacaatgtggaaaacctgcagtcctccatggtgccctttgccaacgagctaaaggaaaagtttaaccagaatatggaagggctcaaggggcaactaaccccccgtgccaacgagctgaaggccacgatcgaccagaacctggaagacctgcgcagcagactggcccctctcgcggagggtgtgcaggaaaaactcaaccatcagatggaaggcttggccttccagatgaagaagaacgctgaggagctccataccaaagtctccacaaatatcgaccagctgcagaagaatctggccccgctggtggaagatgtgcaaagcaagctgaaaggcaacacggaaggactgcagaagtctctggaagacctgaacaagcagctggaccagcaggtggaggtgttccggcgtgctgtggagcccctgggggataagttcaacatggctctggtgcagcagatggagaagttcaggcagcagctgggctccgattcgggggacgtggaaagccacttgagcttcctggagaagaacctgagggaaaaggtcagctcctttatgagcaccctgcaaaaaaaggggagcccagaccagcccctagccctccccctcccggagcaggttcaggaacaggtccaggagcaggtgcagcccaaacctctggagagctgagctgtccctgtgtcctcggcccatcacagcagcagacacctgccctgccccaccacctgtctgtcactctgttcccaagcacttctcgtaccagcttgaggacacatgtcctgtgggtgacgatacctcctctcgttactcaataaagcatctgag

SEQ ID NO: 242 - protein, 391 aa, Rattus norvegicus
MFLKAVVLTVALVAITGTQAEVTSDQVANVMWDYFTQLSNNAKEAVEQLQKTDVTQQLNTLFQDKLGNINTYADDLQNKLVPFAVQLSGHLTKETERVREEIQKELEDLRANMMPHANKVSQMFGDNVQKLQEHLRPYATDLQAQINAQTQDMKRQLTPYIQRMQTTIQDNVENLQSSMVPFANELKEKFNQNMEGLKGQLTPRANELKATIDQNLEDLRSRLAPLAEGVQEKLNHQMEGLAFQMKKNAEELHTKVSTNIDQLQKNLAPLVEDVQSKLKGNTEGLQKSLEDLNKQLDQQVEVFRRAVEPLGDKFNMALVQQMEKFRQQLGSDSGDVESHLSFLEKNLREKVSSFMSTLQKKGSPDQPLALPLPEQVQEQVQEQVQPKPLES

SEQ ID NO: 243 - DNA, 960 bp, Rattus norvegicus
  CDS (1)..(822)
tgaacccagctgctggcgataaactccccaagtgtgaggcagtgtgtgggaagcccaagcatcctgtggaccaggtacagcgcatcatcggtggttccatggacgccaaaggcagctttccttggcaggccaagatgatctccagacatggactcaccactggggccacactgatcagtgaccagtggctgctgaccactgcccaaaacctcttcctgaatcacagtgagaatgcgacagccaaggacattgcccctaccttaacactctatgtggggaaaaaccagctggtggagattgagaaggtagttctccaccccgagcgctctgtggtggatatcgggctgatcaagctcaaacagaaagtgcttgtcactgagaaagtcatgcctatctgcctgccttccaaagactacgtagcgccaggccgcatgggctatgtgtccggttgggggcggaatgtcaactttagatttactgaacgtctcaagtatgtcatgctgcctgtggctgaccaggagaagtgtgagctgcactatgagaaaagcacagtgcctgagaagaaaggcgctgtaactcctgttggggtacagcccatcttgaataagcataccttctgtgctggccttaccaagtatgaggaagacacttgctatggtgacgctggcagtgcctttgccgtccatgacacggaggaggacacctggtatgcagctgggatcctgagctttgacaagagttgtgccgtagctgagtatggtgtgtacgtgagggcaactgatctgaaggactgggtccaggaaacaatggccaagaactagttcagggctgactagagggctgcacacagtggggcagggcaattcaccctggaagaggaagtagaagggttggggacataatctgagggctgctagccctgcattgctcagtcaataataaaaaacgagctttggaccc

SEQ ID NO: 244 - protein, 44 aa, Rattus norvegicus
TQLLAINSPSVRQCVGSPSILWTRYSASSVVPWTPKAAFLGRPR

SEQ ID NO: 245 - protein, 11 aa, Rattus norvegicus
SPDMDSPLGPH

SEQ ID NO: 246 - protein, 6 aa, Rattus norvegicus
SVTSGC

SEQ ID NO: 247 - protein, 7 aa, Rattus norvegicus
PLPKTSS

SEQ ID NO: 248 - protein, 14 aa, Rattus norvegicus
ITVRMRQPRTLPLP

SEQ ID NO: 249 - protein, 14 aa, Rattus norvegicus
HSMWGKTSWWRLRR

SEQ ID NO: 250 - protein, 12 aa, Rattus norvegicus
FSTPSALWWISG

SEQ ID NO: 251 - protein, 23 aa, Rattus norvegicus
SSSNRKCLSLRKSCLSACLPKTT

SEQ ID NO: 252 - protein, 51 aa, Rattus norvegicus
RQAAWAMCPVGGGMSTLDLLNVSSMSCCLWLTRRSVSCTMRKAQCLRRKAL

SEQ ID NO: 253 - protein, 8 aa, Rattus norvegicus
LLLGYSPS

SEQ ID NO: 254 - protein, 40 aa, Rattus norvegicus
ISIPSVLALPSMRKTLAMVTLAVPLPSMTRRRTPGMQLGS

SEQ ID NO: 255 - protein, 7 aa, Rattus norvegicus
ALTRVVP

SEQ ID NO: 256 - protein, 6 aa, Rattus norvegicus
LSMVCT

SEQ ID NO: 257 - protein, 4 aa, Rattus norvegicus
GQLI

SEQ ID NO: 258 - protein, 12 aa, Rattus norvegicus
RTGSRKQWPRTS

SEQ ID NO: 259 - DNA, 483 bp, Homo sapiens
  CDS (19)..(429)
accaacccggtcccagccatgtccaacgtcccccacaagtcctcgctgcccgagggcatccgccctggcacggtgctgagaattcgcggcttggttcctcccaatgccagcaggttccatgtaaacctgctgtgcggggaggagcagggctccgatgccgccctgcatttcaacccccggctggacacgtcggaggtggtcttcaacagcaaggagcaaggctcctggggccgcgaggagcgcgggccgggcgttcctttccagcgcgggcagcccttcgaggtgctcatcatcgcgtcagacgacggcttcaaggccgtggttggggacgcccagtaccaccacttccgccaccgcctgccgctggcgcgcgtgcgcctggtggaggtgggcggggacgtgcagctggactccgtgaggatcttctgagcagaagcccaggcgggcccggggccttggctggcaaataaagcgttagcccgc

SEQ ID NO: 260 - protein, 136 aa, Homo sapiens
MSNVPHKSSLPEGIRPGTVLRIRGLVPPNASRFHVNLLCGEEQGSDAALHFNPRLDTSEVVFNSKEQGSWGREERGPGVPFQRGQPFEVLIIASDDGFKAVVGDAQYHHFRHRLPLARVRLVEVGGDVQLDSVRIF

SEQ ID NO: 261 - DNA, 1454 bp, Rattus norvegicus
  CDS (85)..(1059)
ctcaccttctcagagcttctcctcgggcttcgctgccgccctaaaggttactgtgatctcggcttgagagcaaggtggacagccatggcggcgtctttgtgggttggacctcgagggaccataaacaattatccaggctttaacccatcagtggatgccgaagctatccggaaagcaatcaaaggaattggaactgacgagaaaactctcatcaacattctgacggagcggtcgaacgcacagcggcagctgattgtcaagcatatacaagaggcgtatgaacaggcgctgaaagctgacttgaagggtgatctctctggccactttgagcatgtcatggtggctcttattactgcaccggccgtgtttgatgccaagcaactgaagaaatccatgaggggcatgggcacagatgaagacaccctgattgaaatcttaacaaccaggacaagcaggcagatgaaggagatctcgcaggcctattatacagcatataagaagaatctcagagatgacattagctctgaaacgtctggagacttccggaaagctctgctgactttggcagatggtggaagagacgaaagcctgaaagtggatgaacatctggccaaaaaagatgcccagaccctctacgatgctggtgagaaaaaatggggcacggatgaagacaaattcaccgagatcctgtgtctacggagctttccgcagctgaaactgacatttgatgagtacagaaacattagtcagaaggacattgaggacagcattaaaggagaattatctgggcattttgaagacctgctgctggccgtagttcgctgtacgaggaacaccccagcttttttggcaggaagacttcatcaggctttgaagggagctggaacagatgaattcactctgaacagaataatggtctccagatcagagattgaccttctggacatccgacgtgagttcaagaagcactacggctgctctttatactcagccatccaatcagatacttctggagactacagaactgtgctgttgaagatctgtggaggagatgattgaagaagatggcttccaacagctgcctgccccgatggtggaccgcctcaacagctctgcttactgctttcgtacagcactccagcaatgggcaagcgaatgcaagacagcaacccgtctgcctgatgcgcattggcttccttcaatgcaacagcaaaaatgaacttgattttattttagagcatctcattcataatgtagaggtttataagggaaattcaatctagaattaaagacctactaatgattttttatttggcttaggaagttggaatctgtgttgttcaaagccattaaacataaatcaggatactaaaaatggctgcctttgctaaatgtaatttttgtatttgttttccgtaactactaatactgtatgttgcctggtgccaacaaat

SEQ ID NO: 262 - protein, 324 aa, Rattus norvegicus
MAASLWVGPRGTINNYPGFNPSVDAEAIRKAIKGIGTDEKTLINILTERSNAQRQLIVKHIQEAYEQALKADLKGDLSGHFEHVMVALITAPAVFDAKQLKKSMRGMGTDEDTLIEILTTRTSRQMKEISQAYYTAYKKNLRDDISSETSGDFRKALLTLADGGRDESLKVDEHLAKKDAQTLYDAGEKKWGTDEDKFTEILCLRSFPQLKLTFDEYRNISQKDIEDSIKGELSGHFEDLLLAVVRCTRNTPAFLAGRLHQALKGAGTDEFTLNRIMVSRSEIDLLDIRREFKKHYGCSLYSAIQSDTSGDYRTVLLKICGGDD

SEQ ID NO: 263 - DNA, 11788 bp, Rattus norvegicus
  CDS (1888)..(2041)
  CDS (2508)..(2599)
  CDS (3026)..(3157)
  CDS (3430)..(3616)
  CDS (3956)..(4226)
  CDS (4351)..(4501)
  CDS (4729)..(4878)
  CDS (7573)..(7739)
  CDS (10190)..(10371)
  CDS (10926)..(11029)
cccgggcgagcgccgggagggtggagagtcaccgggcggggctggaggaatgtccgggacctataaatctgggcaacgccctggtaggccagggcagatggggcacctgggcagaattccaaaatgggattatgtagcctctgaggtcctaaagcaacaggtggcggaccacccggggatctaggggtggtggcggcggtggacccgagggcgggtcctgcctcctcaccacttccccattggccatcagaatgacccatgcgcaattttggtttgcaatgtccttccgccacggaaggtagtccccctcaaaagggcaacctgcttgtcccgcctaccctgcgactctctcagaaggtgcgggtgcctgttgagaggcggggctctgctagctgctgcccggattgggcgaggggcggggctgcggagggattgcggcggcccgcagcagtgataaccttgaggcccagtctgcgcagccccgcacagcagcgacccgtcctaagtcgacagacgtcctctttaggtattgcaacaggatctgaagtacgcccgaggtgagcggggagaacctttgccattctgtggcccagagccaatgccatagtggatcactagtgggtggctgcaatgtcaggtggcagagccaggcttgggtgcatgttctttaggtatccagaaaagccgatgtccagggtagagtgcgggtctttgggaaggcagggaagagcaaggagatgtggagtgcaggctgtgtgctcaggagtttgaaaggagcctcgtggcctgaaaattgattcaagtctctggtattctgtgaggtacatcccaggttctcgcttactcagccaactatccagctcagtgagtgcttagctgtaagtcgtaataaagtaaaagcaaaggtcaggacagctgttgggattgtgacctgggtgattaattgcctggaacagatgttcagactactgtgtcgtggtccctatcagacagagaaggagactctagatagccagaactggggctgggaaagctgggtctaatgtcagctcttgggaagagtagtgactttcaaggtcaacctcggttgcacagtggatttcaggccagcatagactagctactgtgtgtgattccatctcctaggttactgaagactccttggtgaggttgtaatgactttggagccatttcaatgtccttgtgcaaaatttgctttgtgtgtcttgtacatggtgctgcttttttgcttcttgtccagaaaaaaacttgttgcctgtaatttggaccttattcctgtgtcggatagaggctaaggaatacatttaggtgatacctcaaacctaggactttaaaaagaaaggacttgggacagggttcgtctcttggcagcaggatcgtttaggtcatggcgaacatgataaagaggctatgtcagtgccaaagcaggtttgacattgtcgtgataggcttcccagatgttcgtgtgctgacacattagctacgtgctctgcaggagtggggaggtttccttgtgtgggaaggtatgttctctctagggttggtgtgaagctcttcaatagatggcagccgttgtaagaagctctgcttaaactggcagccagggtgtgtatgtgcactgggaaggaagctacttttgttcaccaaggtctttgctgttcgttcatagtcacaggagccctttgcccaatttgagtagtacccacataaccagcacgtgccaggcctctgagtgacttgtgcacaaagcagtcttattgggttaatgtgtaagcgggagacagtctcctatgccaaatggttcattaagcactgcctagtctaattgaactcttcaaatctccgggatccaggatctcagaaaccatgcccaagccagacagcgaagcagggactgccttcattcagacccagcagctccatgcagccatggctgacaccttcctggaacacatgtgccgcctggacattgactccgcacccatcacggcccgcaacactgggatcatctgtaccattggtgagtgagtgtggcccccttcgcagggcttctgcctggtttgaaaggcgtaataaccattgcagggctaacctaggttctgagagacatgtccacacttttagaggaacgtattggtgtacttcttctgcacttggtgaggttcagggtggtctagtggcctttgcaggagtagttcagggacttcagatctttttcctgtgctgtcactccactttctgcagaatttatagaaaatgatagtgtccttccttacatataaattaagagagtccttccttacatataaatcaagagagttgactagcacagtagtctttctggactttggaaagacctttctctaaatttgtggaggtattaaaaacaaaggacaaggagttgcctttgatagtagcagatttcatatactttcctacctgagaatcatgattttcttcctgtggctctaaatgtttcttggtaggccctgcttcccgatctgtggagatgctgaaggagatgattaagtctgggatgaatgtggctcggctgaatttctctcatggaacccatgaggtgagtggcagcttgatccaggaggttcgggacttgctgctgctgtgctccaggcttctcagtgaatggacgttgctctacttacatttagatcccctctctccctcttcccctctggccaacttcattggcatcaacaacctgcctgctttgtcgccggccaggttatccctaccatcaagcttcaccagggctttcttattctatgtgcaccttcgatgaggggctgtggctgtctgtcttggatgaggggctgtggctgtctgtcttggttttaaccattcctggagacggtggaatgaatcgtagctccctcgagctcttggcctaattgatcatctttggctccagggtggctcagggcatgggaactggacttgggtgtggagaacacctacctgtcaatctccccttctttctctccagtaccatgcagagactatcaagaatgtccgtgcagccacagaaagctttgcatctgatcccattctctaccgacctgttgcggtggctctggatacaaagggacctgagatccggactggactcatcaagggcgtgagtatccaggagtttaggtctttaaatgagaatatttttcatctgcctggtaggaattattatagatgcacatttttggtatgtgaataacatacttaagtctcactctggggacctggtttgttgtttgttttgtttgtttccctcaataaacaaattcaggatttacagaaaggtgatcggtttcttggggctttgagccagagtttgagcgccgccatcagggtgttggcgtccacagtcacacgcctctgctgtctttaatctagagcggcaccgcagaggtggagctgaagaagggagccacactgaagatcaccctggacaacgcctacatggagaagtgcgacgagaacatcctgtggctggactataagaacatctgcaaggtggtggaggtgggcagcaagatctacgtggacgatgggctcatctccctgcaggtgaaggagaaaggtatgtgtggtgtacagtccacggcccaatgccactcccatccccagaactctggtaagcacttaacctagcatgtatgaattggtctcccaaggtcaaaagtttaaggtggttgttggtctgcatccctggcctgtctgaaacactgcctgagaaaaaatagacaaataacctacaaaggcctatgtgtacacctctaccctttagttccagcactcgggaatcagcaggtgtgtgagttctcatgtgtaaggactactcctgtatgcctagaatgagtctagagttctcttggcttctcacaaactgagatagatggtcttgatccctttcacacaggtgctgactacctggtgacagaagtggaaaatggtggctccttgggcagcaagaagggcgtgaacctgcctggtgctgctgtggacctccctgctgtgtcagaaaaggacatccaggacctgaagtttggggtggagcaggacgtggacatggtgtttgcgtctttcatccgcaaggcggctgacgtgcatgaggttaggaaggtcctgggagagaagggcaagaacatcaagatcatcagcaaaatcgagaaccatgaaggtgtccgcaggtgaaggtccactcctaccgtgtgcctggggtgtggccttgagggcacctctgtcagggcccaggaaagctctgtccattctttggttgtacttcctgttctatagcatctttctttttatcaggtttgatgagattttggaggccagcgatggaatcatggtagctcgtggtgacctgggcattgagattccggcagagaaggtcttcctagctcagaagatgatgattggacgatgcaaccgagctgggaagccagtcatctgcgccacccaggcatgtgctatcccttccttctgtgttctccacctaggagacctggtcttgacctggcctttaggtacacgtacccgcacatagctatgacctgcgtacctgtgcaagcttcggggaattgccctggaatcatcactgaagatgtcctgctcttccattatttagtgactttcatttagcggtggtctcttacttaataaaaacccttgtttgtcccctcctagatgctggagagcatgatcaagaagccacgccccacccgtgctgaaggcagtgacgtggccaatgcagtcctagatggagctgactgcatcatgctgtccggagaaacagccaaaggggactaccctctggaggctgttcgcatgcagcacctggtgagtaagtcctcagagtcctggggtagaagagctctgctggagaggcctctgtccagtcttgttacattgctcccgtcacagcaaggagagtgaggtttgtggagtgtgcttgagtttcattgtgctttcactgcctgcacctgcccctttgtcctgctctggggattacataggccacatctggctaaaatatcaaggtcctaggatgcagtcaagggatgccttccttgtggacacccagagggcctgggtacctctattctaaaggagccaagagtttgttcagctattcgccttgttacctctcatttggtctcctgtggtctgcccatgggcaatgcttctctccactgcagctgtagccatactgagctgctttaagctggccgtgcatggtgcctgtgacatgggacttcctcccttgctgtgccagacccaactcggggctacaaatagctctgggggtggggaatgggtgctaatttagcaggttctgtctggtctaggaattataaagacttctcaggcatattatgtgctcttttgattaagtcttctggtttcagtaagatagggtctggcgcaagcttgtaattccaacaatcaaatcaagcctgcggcaggaagatggcttgagattaggctggactagaatgagacatcttgtagaagcaacaggcgtcagtgacctgtccctgcggactttccacccaggcctccgtcttctgtgttctgctccagaacttcttccggagcagaacaattatctggggcatcagttagggaccgttgcctgataaaggcatggtggattagctttttgggggttttctattcccttttcagccaacaaagaaccacagtatcttttgtggctccagtttcccacaagcccccccaaacttaagacaagtgaaagaaaagaaggaagccccttctgggttaggcatcttaccttgctttatatgtatatgagagttgagtagattccatgatctttccatggatttatctgaattatagctgtagccagatgtttgcctatattgaaacagaccagcgctttgactcggctggtcatgacctgttctgattggaattgtgactggtcctcatagcttctcatagctgcaggcattctctcccagaagacttttcccttccttcaatctcccccacagtagctgccttcctggtttacaccaaaaccccttttctacttacctggcctcacagtggtcaggaacaggactttgaccaggtattctaaagcatgtagtcacataaatgtatttttggatagctcaagaagaccttgcccaaagtggcggttgatgagattaattacaattaattatatgtgtatgagttagttttggtgtcctgtccttttctcatgccctggtctttcctatgaacagacaccttagaacctcgaggctgggattgcatggccctgctcagaagatgagtcacagagtccgggttagactgtggctaccccctcagggatacaaatttctctatcagttaacacttaggacagcttctcccctttctttatctgtttgctgtttcctcctgtgtctaactgattcagttcaaaacctgtaattaaaagctagacatcccagctgtggttgcttcctgtccatgcctcttgtcctttgggcttgcctgcattccatgcttaaccaaaagattactttccacttgcaaatctgctaatgctaccaataaaatcgagtgctggtttcatatcattcctggaattgcactctctaaaactttatttctttatttctaatgcttggttttacttgaacaggtggtctgtatataacacatttgctatcctgtaaccgttttaattattgcagtttgaatctgtgtcttgaaaggcctgtgtgctttcccaggcgtctgcctcctcacatggctgttcagtgtaccgtgttcaagtgagccagtcgaccactgttctgtttagaacttgtgcactgcaactttggctcttttgaccctcacccccagctttcagagctgcccgagtgtttccactgtaagccaagtgcaagcgctcactcttgtgtgtaggcggagttggatgccttgtaaccacatagccatgtgaggaggggacgcctttttcttcctgtaagctgtgtcaggaggcagtgtggtcaagcggaagtgtagttggctccaccttggcatctttccatgccagggtccctttctcagctttaatcaaaaacaaaagaaatgatggatggtgcatgcctagcacttgggaggctgaggcaaagaaaatagtggtgttttgaggctgaccatggcaagttcaaggccagtaggtgctatggtaagatcctatctcaaacctgtgtggggttgagaattggctttttttgtttgtttgtttttagaaacaggaaatcccaaaaggatactatctttccagaagggaaggaaggatctgtccgtgtgtttgaacagaaaagagagccacccaaaatcccacatataataccattccaggctttgaccatcctgcctctgtatctgcatggagaagaaaagattaacctaagagttccttcctctcattagttccctgtctttccatgtgttgtctcttgtttttgccttcatccttcttccttatccttcctaccctaaaccttacagatagctcgagaggctgaggcagccgtgttccaccgcctgctgtttgaagagcttgcgcgagcctccagtcaatccacagaccccctggaggccatggccatgggcagcgtggaggcctcttataaatgtttagcagcagctttgatagttctgacggagtccggcaggtagggccctgagggcaggtatcattataagataaccagcttctcacacaactagggcccactgtgtgcctgagcctgggcatagcctctctcctgcaggaaggcagccaaggaggtcacgatagggcaggaccaaaggattccctagtgggtacagtggaagtcacaggcactggttcaggatggttccctgtggagtttctaatcttgctcaagtttcagaaacgtgttagtgaactcatctttctcctggctttttgtgcccaggacatgttccttcccagttgcctgtgactcttctccttcatttgtgacaaagctctgacaaagccctgtcccccttcctcgtccctctggacggatgttgctcccctagattgcccgagaggcagaggctgccatctaccacttgcagttattcgaggaactccgccgcctggcgcccattaccagcgaccccacagaagctgccgccgtgggtgccgtggaggcctccttcaagtgctgcagtggggccattatcgtgctcaccaagtctggcaggtaggaggcggcagtggctccctggggatcccagagcaactctgggctgattttaagacccctggctgccatcaaaggactccaggaagcactcccaggtacatcagattaggtggctccagtgccagtcagtgcaggcctgcctcagggcctgaagcatatatacagttttgcttagttacggtgtggaagctgggcatgggtacatgcctttaatcctcccagcattcgggcagaagaggtgggcaaatgtctgcattcgtggacagtgctggtctacaaagcaagttccaggacagagccctagctcacaaaaattaactcagctggtaaatactacttgctacaccaagttagacggatggaggagggagaaaggtaacttagcaagcgtgcccaaggacatatacagtaacactttttctcatcccacttggagggagctcaatggataaagtgttggcaatctggatttggatctggcacctgtgggtttttgttgttgtttgggtttttgtttttttttttttttttaagtcacctggagaagtacgttaggcctttaggagcatggggttttggtttttaagatttatttattatatatgaactacactctccctatcttcagtcgcaccagaagagggtgattacagatgattgtgtaagccaccatgtggttgctgggagttgaactcaggacctctggaagagcagttagtgctcttaaccactgagccatctctccagccagcactgttctttcagaagcccaacacatacatgacagctcacactatctaactgcagtcctggggggaatctaatgccctcttctaacttccagccgtacatgtttatatgatgcatgtggtcaggatacccagacagctggagggaaaggaaggtgcccaacacacctgtgtgcctgtaatcccagcactcatggtacagaggtagaaagatcacaagataggtctaatctgagcaaattctgcaacagcctagatacagaaagccaaacacataaaaatcagtgtgggctgaggatgttgacctttgtgtgaattggccatgaacattgtatgcagctggaagcaagggatggggtgctgaaaaatggggaccttaaaactaattttctgaagtcctgaagtttcgagagctccaagatacaagttctatgctaatcctggactttctctgaagagttcctggttccttcaaagcccatgtaggccagctagaagcagggtattttctgcctgtggaatggccacatcccctaataccttgtgtgtcctcaagatgcctagttaattcagtaagcctgaaacagatctgatagaagtaaacatatcatttgctatcggttgaggagagaggggctccctacattcccaaaggatcttgattggccagatattaaccatgcctggtcacacctagattttccaaaaaaccatagaaattcagaggtttcttttagcaccaagttcagctgataagactcccaaaggagcagtatagtactctctggcaaatactgtccactccagggtctctgcagataccagaagtcaggagctaggcacatggtgcttggattgtaaaagttgctggcagctacaggatggttctggtgagattaggccagagctgcctcactgcctgatggaagggttcacagtgtgggagggatcctgccagccgtggtcctatgggactgcccacactgagatcaggacaatgagttaaaaaggacaggacaggtctgagggggtggccaggcactaaacagtaattgtaagtgggcaaacctgtggcctagaggtgaattagagggtgctcctttggctgactgaaagggtctcgtgacacaatggccattcttcccaccttctcaggagtgctcaccaagtggcccggtaccgcccaagggctcctatcattgctgtgacacgcaatccccagacagcccgccaggcccatctgtaccgtggcatcttccctgtgctgtgtaaggatgccgtactggatgcctgggctgaggacgttgatcttcgtgtgaacttggccatgaatgttggtatgtagctggaagcaagggatggggtgctgggaaatggggagcctaaaactaccatttcctgaagccctcacccaattttgggcccaaggcaaaattaattgcctcattaggctcttgtaagattaattggagctactgccctgtggggtggggcacacaagctgttgtggtctttgttcctatataaggttggatatcaagagacaaggaagcagctgaccctgaacttgggcaaggctggccactctagagtctaaactgaatggtgtccaaaggtccctgcagtctgagttttgcctcagcccttgtttaagctaggagacttgcaccaccttgtggtaaaaagaagtaactggcaacctgctctcctacctgaattagaagcaatagggcatttgttatcctgcctggttaggcttgtgtctgggctgggagaaagcaccaccttgtggtaggagagagtactggttgctcagttaggactgggtagggctttgcagttatccccaagtgttatatacctctactcaccaacctccttctcccctcaggcaaggcccgaggcttcttcaagaagggagatgtggtcattgtgctgactggatggcgccctggctctggcttcaccaacaccatgcgtgtagtgcctgtaccatgatgatcctctggagcttctcttctagcccctgtcccttcccctcccctatcctatccattaggccagcaacgttgtagtgctcactctgggccatagtgtggcgctggtgggctgggacaccaggaaaaattaatgcctctgaaacatgcaatagagcccagctatttttcatggccctacttgagccaggggtgaaggaggaatgcaggattggaaaccctctgactttatcacagaagggcagcattatctctgtgttctttgctcctgtagaaagttttccagagaattcccagccctggcctggaatcaggagacagcaagaacagaggctgggggcccagggttcccatgtagatgacttttggccctgtccctgacttgctttcccaacagctttggcctctctcctcgtgcactccactgctgtccctgcagatgttccactctccacctcgtactctgcagcgtctccaggcctgttgctatagtgcccacctgaatgtcaataaacagcagcggaacgacctgtgttcttttcttcctggggggcgtggttgaggctatcctctgagcagtcgaaaatgacaaccggcctaaaggctcagcctggagccgagtatataggttgcctcctccaacagcaccaagtggggctatctatgtgttggaaagctcactgttttatttcaggacagactggaaaggtctgggacaggttcagctagcacctgtaatggtgggtagaccggaggg

SEQ ID NO: 264 - protein, 530 aa, Rattus norvegicus
MPKPDSEAGTAFIQTQQLHAAMADTFLEHMCRLDIDSAPITARNTGIICTIGPASRSVEMLKEMIKSGMNVARLNFSHGTHEYHAETIKNVRAATESFASDPILYRPVAVALDTKGPEIRTGLIKGSGTAEVELKKGATLKITLDNAYMEKCDENILWLDYKNICKVVEVGSKIYVDDGLISLQVKEKGADYLVTEVENGGSLGSKKGVNLPGAAVDLPAVSEKDIQDLKFGVEQDVDMVFASFIRKAADVHEVRKVLGEKGKNIKIISKIENHEGVRRFDEILEASDGIMVARGDLGIEIPAEKVFLAQKMMIGRCNRAGKPVICATQLESMIKKPRPTRAEGSDVANAVLDGADCIMLSGETAKGDYPLEAVRMQHLIAREAEAAVFHRLLFEELARASSQSTDPLEAMAMGSVEASYKCLAAALIVLTESGRSAHQVARYRPRAPIIAVTRNPQTARQAHLYRGIFPVLCKDAVLDAWAEDVDLRVNLAMNVGKARGFFKKGDVVIVLTGWRPGSGFTNTMRVVPVP

SEQ ID NO: 265 - DNA, 680 bp, Rattus norvegicus
tccccaagtgttatatacctctactcaccaacctccttctcccctcaggcaaggcccgaggcttcttcaagaagggagatgtggtcattgtgctgactggatggcgccctggctctggcttcaccaacaccatgcgtgtagtgcctgtaccatgatgatcctctggagcttctcttctagcccctgtcccttcccctcccctatcctatccattaggccagcaacgttgtagtgctcactctgggccatagtgtggcgctggtgggctgggacaccaggaaaaattaatgcctctgaaacatgcaatagagcccagctatttttcatggccctacttgagccaggggtgaaggaggaatgcaggattggaaaccctctgactttatcacagaagggcagcattatctctgtgttctttgctcctgtagaaacttttccagagaattcccagccctggcctggaatcaggagacagcaagaacagaggctgggggcccagggttcccatgtagatgacttttggccctgtccctgacttgctttcccaacagctttggcctctctcctcgtgcactccactgctgtccctgcagatgttccactctccacctcgtactctgcagcgtctccaggcctgttgctatagtgcccacctgaatgtcaataaacagcagcggaag

SEQ ID NO: 266 - DNA, 4677 bp, Rattus norvegicus
  CDS (52)..(4554)
agagttcaggggctgagggctcagacctacccttccctgcccctgtccaccatgaggagaaaccagctgcccataccagtctttcttttactgctcctgcttcttcccagagatgccaccgcagctactggaaaaccacgatatgtggtgctggtcccctcagagctctatgcaggagtccctgaaaaggtctgtgtccacctcaaccacctgaacgagactgtgacactcaacgtaactctagagtatggagtacagtactcaaacctcctcatagaccaggctgtggataaggactcctcctactgcagctctttcacgatctcaaggccgctttcaccctcggctctcattgctgtggagataaaaggaccaacgcaccacttcataaagaagaagtcaatgtggataacaaaagctgagagcccagtctttgtccagacagacaaacccatatacaaacctggacagacagtgaaattccgagttgtctctgtggatatcagttttcgcccggttaatgaaacgttccccgtcgtttatattgagaatcccaagaggaacagaatctttcaatggcaaaatgtcgatctaccaggaggactgcaccagctctctttcccactgtctgttgagccagctctaggcatctacaaggttgtagtgcagaaggactcagggaagaaaatagaacattcctttgaggtgaaggaatatgttttacccaaatttgaggtgcaagtaaaaatgcccaagacgatggctttcctggaagaggaacttgttgtaactgcttgtggcttatacacatacggaaagcctgttcctggtctggtgacaatgaaagtatgcagaaaatatacacagtcctactccaactgccatggccaacactcgaaaagtatctgtgaagaattcagcaaacaggcagatgaaaaaggatgtttcagacaagttgtaaaaaccaaagtgttccagcccagacagaaaggctatgacatgaagatagaggtggaagccaagatcaaagaggacggaacaggaatagaactaactggtactggatcatgtgaaatcgcaaataccttaagcaaactgaaatttactaaagcgaatacattttacaggcctgggctgcctttctttggacaggttcttcttgttgatgagaagggtcaaccaatccccaacaaaaatctaactgtccaagtgaattcagttaggtcccagttcacttttactaccgatgagcatggcttggccaacattctcatcgacaccaccaacttcacgttttcgtttatgggaatcagggtcatctacaagcagaacaacatctgctttgataactggtgggttgatgaatatcacacacaggcagatcattctgcagctcgcatcttttccccaagccggagttatattcaacttgaacttgttcttggtactttggcttgtgggcaaactcaggagattcggatacacttcctcttgaatgaagatgccctgaaagatgcaaaagacttaaccttttactacctgatcaaagcaaggggaagcatctttaactcaggaagccacgtgttaccgcttgaacaaggaaaagtgaaaggagtagtttccttcccaattcgagtggagccaggcatggctcctgtggctaagctgattgtctacactattttacctaatgaagaacttattgctgatgttcagaaattcgacattgaaaagtgttttgccaatacggtgaatttgagtttcccatcagcacagagcctgccagcctctgacacccacctgacggtcaaagccacacctctgtccctgtgtgccctcactgcggtcgaccagagtgtgctgctactgaagcccgaagccaagctctctcctcaatcaatctataatttgctgccacaaaaggctgagcagggggcttacttaggacccctaccgtacaaaggcggtgagaactgcatcaaagcagaagacatcactcacaacggcatcgtgtacacaccaaagcaggatctgaacgacaatgacgcatacagcgttttccagtccataggattaaaaatttttaccaacaccagagtccacaaaccacgctattgtccaatgtatcaagcctatccgcctttgccctacgtaggagagcctcaagccttagctatgtctgcaatcccaggagccggctacagatcaagcaacattaggaccagctcaatgatgatgatgggcgcatcagaagtagctcaggaggtagaagtaagagagacagtgcggaagtacttcccggaaacctggatctgggacatggtgccgctggacttatccggtgacggtgagttgccggtaaaggtccctgacaccatcactgagtggaaggccagtgcattctgcttgtctggaactactggccttggtctctcctccaccatctcccataaagtcttccagcccttcttcctggagctcactctcccctactctgtggttcgaggcgaagcatttatcctcaaagctaccgtactcaactacatgcctcactgcattcggatccatgtgagcctagagatgtctcctgatttcctggcagtccctgtggggagccatgaagattctcattgcatctgtggaaatgaaagaaaaaccgtgtcctgggctgtgaccccaaagtcgctgggggaggtgaacttcacagctactgcagaagctttgcagtctccagaactgtgtggcaataaggtggcagaagtgccagcccttgtacagaaggacactgtagtgaagcccgtaatagtcgagcctgaaggaattgagaaggaacaaacgtacaacacactgttatgcccacaagatgctgagttacaggaaaattggacactggatcttccagccaatgtggttgaaggatctgccagggctacacagtccgttttgggcgatatactaggctctgcgatgcaaaacctccagaatcttctccagatgccctatggctgtggggaacaaaacatggtcctcttcgtccctaacatctacgttctggagtatctcaatgagacacagcagctgacagaggcgatcaagtccaaggccattagctacctcatcagcgggtaccagaggcagctgaactatcagcacagtgacggttcatacagcacattcggggaccgcggtatgaggcacagtcagggaaacacttggctcactgcatttgtgctcaaggccttcgctcaagctcagtcatacatctatatagaaaagacacacatcacaaatgctttcaattggctctcgatgaaacaaagggagaacggttgtttccaacagtctggatccctgctcaacaatgcgatgaagggtggtgtggatgatgaagtgacactctctgcctatatcaccattgctctgctggagatgcccctgcctgtcactcacagtgttgttcgtaatgctctattctgcctggaaacggcctgggcctccatctcaaacagccaagaaagtcatgtctacacaaaagcactgctggcctatgcctttgccctggcaggaaacagagccaagcgaagcgaggtgcttgaatccctaaacaaagacgctgtgaatgaggaggaatcagtgcactggcaacgtcctaagaatgtcgaggaaaatgtccgggaaatgaggtccttctcttataaaccgcgggccccttctgctgaagtggagatgacagcttacgtgcttctcgcctacctcacctctgcatcttcccggcctacgcgagacctttcttcatcggacctgactacagcatccaagattgtgaagtggatcagcaaacaacaaaactcccatggggggttctcctccactcaggatacagtggtggctcttcaagccctctccaaatatggagcagccacttttacgaaaagtaataaagaagtgtcggtcaccatcgagtcttcagggaccgtctctgggactctccatgttaacaatggcaatcgcctgctgctgcaggaagtcaggctggcagatctgcccggaaattacatcaccaaagtgtcagggtcaggatgtgtgtacctccagacatctctaaagtacaacatccttccggaggcagaaggagaagcgcccttcactctgaaggtcaacactctccccttaaactttgataaggcagaacatcacagaaagttccagatccacatcaacgtaagctacattggagaacgacccaactccaacatggtcattgttgatgtgaagatggtgtcaggcttcatacctgtgaagccatccgtgaaaaagctccaagaccagtctaacattcagaggactgaagtgaacaccaaccacgttctaatctacattgaaaagctaaccaatcaaaccatgggtttctccttcgcggtggaacaagacattccagtaaagaacttaaaaccagccccagtaaaagtctacgattattatgagacagatgaattcgccattgaagaatacagtgcccctttcagttctgactctgaacaaggaaatgcttaaaaataggaacctatagatttcctcagaaagactcctccacacgtgaagaaccaagacagcaagataaatggaaaggaattaaaaacccataaaatttatatgttgaataaagttacgacattt

SEQ ID NO: 267 - protein, 1500 aa, Rattus norvegicus
MRRNQLPIPVFLLLLLLLPRDATAATGKPRYVVLVPSELYAGVPEKVCVHLNHLNETVTLNVTLEYGVQYSNLLIDQAVDKDSSYCSSFTISRPLSPSALIAVEIKGPTHHFIKKKSMWITKAESPVFVQTDKPIYKPGQTVKFRVVSVDISFRPVNETFPVVYIENPKRNRIFQWQNVDLPGGLHQLSFPLSVEPALGIYKVVVQKDSGKKIEHSFEVKEYVLPKFEVQVKMPKTMAFLEEELVVTACGLYTYGKPVPGLVTMKVCRKYTQSYSNCHGQHSKSICEEFSKQADEKGCFRQVVKTKVFQPRQKGYDMKIEVEAKIKEDGTGIELTGTGSCEIANTLSKLKFTKANTFYRPGLPFFGQVLLVDEKGQPIPNKNLTVQVNSVRSQFTFTTDEHGLANILIDTTNFTFSFMGIRVIYKQNNICFDNWWVDEYHTQADHSAARIFSPSRSYIQLELVLGTLACGQTQEIRIHFLLNEDALKDAKDLTFYYLIKARGSIFNSGSHVLPLEQGKVKGVVSFPIRVEPGMAPVAKLIVYTILPNEELIADVQKFDIEKCFANTVNLSFPSAQSLPASDTHLTVKATPLSLCALTAVDQSVLLLKPEAKLSPQSIYNLLPQKAEQGAYLGPLPYKGGENCIKAEDITHNGIVYTPKQDLNDNDAYSVFQSIGLKIFTNTRVHKPRYCPMYQAYPPLPYVGEPQALAMSAIPGAGYRSSNIRTSSMMMMGASEVAQEVEVRETVRKYFPETWIWDMVPLDLSGDGELPVKVPDTITEWKASAFCLSGTTGLGLSSTISHKVFQPFFLELTLPYSVVRGEAFILKATVLNYMPHCIRIHVSLEMSPDFLAVPVGSHEDSHCICGNERKTVSWAVTPKSLGEVNFTATAEALQSPELCGNKVAEVPALVQKDTVVKPVIVEPEGIEKEQTYNTLLCPQDAELQENWTLDLPANVVEGSARATQSVLGDILGSAMQNLQNLLQMPYGCGEQNMVLFVPNIYVLEYLNETQQLTEAIKSKAISYLISGYQRQLNYQHSDGSYSTFGDRGMRHSQGNTWLTAFVLKAFAQAQSYIYIEKTHITNAFNWLSMKQRENGCFQQSGSLLNNAMKGGVDDEVTLSAYITIALLEMPLPVTHSVVRNALFCLETAWASISNSQESHVYTKALLAYAFALAGNRAKRSEVLESLNKDAVNEEESVHWQRPKNVEENVREMRSFSYKPRAPSAEVEMTAYVLLAYLTSASSRPTRDLSSSDLTTASKIVKWISKQQNSHGGFSSTQDTVVALQALSKYGAATFTKSNKEVSVTIESSGTVSGTLHVNNGNRLLLQEVRLADLPGNYITKVSGSGCVYLQTSLKYNILPEAEGEAPFTLKVNTLPLNFDKAEHHRKFQIHINVSYIGERPNSNMVIVDVKMVSGFIPVKPSVKKLQDQSNIQRTEVNTNHVLIYIEKLTNQTMGFSFAVEQDIPVKNLKPAPVKVYDYYETDEFAIEEYSAPFSSDSEQGNA

SEQ ID NO: 268 - DNA, 4701 bp, Rattus norvegicus
  CDS (95)..(4597)
gaattccggccttttgtggcagcaaattatagattgattgaggagagttcaggggctgagggctcagacctacccttccctgcccctgtccaccatgaggagaaaccagctgcccataccagtctttcttttactgctcctgcttcttcccagagatgccaccgcagctactggaaaaccacgatatgtggtgctggtcccctcagagctctatgcaggagtccctgaaaaggtctgtgtccacctcaaccacctgaacgagactgtgacactcaacgtaactctagagtatggagtacagtactcaaacctcctcatagaccaggctgtggataaggactcctcctactgcagctctttcacgatctcaaggccgctttcaccctcggctctcattgctgtggagataaaaggaccaacgcaccacttcataaagaagaagtcaatgtggataacaaaagctgagagcccagtctttgtccagacagacaaacccatatacaaacctggacagacagtgaaattccgagttgtctctgtggacatcagttttcgcccggttaatgaaacgttccccgtcgtttatattgagaatcccaagaggaacagaatctttcaatggcaaaatgtcgatctaccaggaggactgcaccagctctctttcccactgtctgttgagccagctctaggcatctacaaggttgtagtgcagaaggactcagggaagaaaatagaacattcctttgaggtgaaggaatatgttttacccaaatttgaggtgcaagtaaaaatgcccaagacgatggctttcctggaagaggaacttgttgtaactgcttgtggcttatacacatacggaaagcctgttcctggtctggtgacaatgaaagtatgcagaaaatatacacagtcctactccaactgccatggccaacactcgaaaagtatctgtgaagaattcagcaaacaggcagatgaaaaaggatgtttcagacaagttgtaaaaaccaaagtgttccagcccagacagaaaggctatgacatgaagatagaggtggaagccaagatcaaagaggacggaacaggaatagaactaactggtactggatcatgtgaaatcgcaaataccttaagcaaactgaaatttactaaagcgaatacattttacaggcctgggctgcctttctttggacaggttcttcttgttgatgagaagggtcaaccaatccccaacaaaaatctaactgtccaagtgaattcagttaggtcccagttcacttttactaccgatgagcatggcttggccaacattctcatcgacaccaccaacttcacgttttcgtttatgggaatcagggtcatctacaagcagaacaacatctgctttgataactggtgggttgatgaatatcacacacaggcagatcattctgcagctcgcatcttttccccaagccggagttatattcaacttgaacttgttcttggtactttggcttgtgggcaaactcaggagattcggatacacttcctcttgaatgaagatgccctgaaagatgcaaaagacttaaccttttactacctgatcaaagcaaggggaagcatctttaactcaggaagccacgtgtttccgcttgaacaaggaaaagtgaaaggagtagtttccttcccaattcgagtggagccaggcatggctcctgtggctaagctgattgtctacactattttacctaatgaagaacttattgctgatgttcagaaattcgacattgaaaagtgttttgccaatacggtgaatttgagtttcccatcagcacagagcctgccagcctctgacacccacctgacggtcaaagccacacctctgtccctgtgtgccctcactgcggtcgaccagagtgtgctgctactgaagcccgaagccaagctctctcctcaatcaatctataatttgctgccacaaaaggctgagcagggggcttacttaggacccctaccgtacaaaggcggtgagaactgcatcaaagcagaagacatcactcacaacggcatcgtgtacacaccaaagcaggatctgaacgacaatgacgcatacagcgttttccagtccataggattaaaaatttttaccaacaccagagtccacaaaccacgctattgtccaatgtatcaagcctatccgcctttgccctacgtaggagagcctcaagccttagctatgtctgcaatcccaggagccggctacagatcaagcaacattaggaccagctcaatgatgatgatgggcgcatcagaagtagctcaggaggtagaagtaagagagacagtgcggaagtacttcccggaaacctggatctgggacatggtgccgctggacttatccggtgacggtgagttgccggtaaaggtccctgacaccatcactgagtggaaggccagtgcattctgcttgtctggaactactggccttggtctctcctccaccatctcccataaagtcttccagcccttcttcctggagctcactctcccctactctgtggttcgaggcgaagcatttatcctcaaagctaccgtactcaactacatgcctcactgcattcggatccatgtgagcctagagatgtctcctgatttcctggcagtccctgtggggagccatgaagattctcattgcatctgtggaaatgaaagaaaaaccgtgtcctgggctgtgaccccaaagtcgctgggggaggtgaacttcacagctactgcagaagctttgcagtctccagaactgtgtggcaataaggtggcagaagtgccagcccttgtacagaaggacactgtagtgaagcccgtaatagtcgagcctgaaggaattgagaaggaacaaacgtacaacacactgttatgcccacaagatgctgagttacaggaaaattggacactggatcttccagccaatgtggttgaaggatctgccagggctacacagtccgttttgggcgatatactaggctctgcgatgcaaaacctccagaatcttctccagatgccctatggctgtggggaacaaaacatggtcctcttcgtccctaacatctacgttctggagtatctcaatgagacacagcagctgacagaggcgatcaagtccaaggccattagctacctcatcagcgggtaccagaggcagctgaactatcagcacagtgacggttcatacagcacattcggggaccgcggtatgaggcacagtcagggaaacacttggctcactgcatttgtgctcaaggccttcgctcaagctcagtcatacatctatatagaaaagacacacatcacaaatgctttcaattggctctcgatgaaacaaagggagaacggttgtttccaacagtctggatccctgctcaacaatgcgatgaagggtggtgtggatgatgaagtgacactctctgcctatatcaccattgctctgctggagatgcccctgcctgtcactcacagtgttgttcgtaatgctctattctgcctggaaacggcctgggcctccatctcaaacagccaagaaagtcatgtctacacaaaagcactgctggcctatgcctttgccctggcaggaaacagagccaagcgaagcgaggtgcttgaatccctaaacaaagacgctgtgaatgaggaggaatcagtgcactggcaacgtcctaagaatgtcgaggaaaatgtccgggaaatgaggtccttctcttataaaccgcgggccccttctgctgaagtggagatgacagcttacgtgcttctcgcctacctcacctctgcatcttcccggcctacgcgagacctttcttcatcggacctgactacagcatccaagattgtgaagtggatcagcaaacaacaaaactcccatggggggttctcctccactcaggatacagtggtggctcttcaagccctctccaaatatggagcagccacttttacgaaaagtaataaagaagtgtcggtcaccatcgagtcttcagggaccgtctctgggactctccatgttaacaatggcaatcgcctgctgctgcaggaagtcaggctggcagatctgcccggaaattacatcaccaaagtgtcagggtcaggatgtgtgtacctccagacatctctaaagtacaacatccttccggaggcagaaggagaagcgcccttcactctgaaggtcaacactctccccttaaactttgataaggcagaacatcacagaaagttccagatccacatcaacgtaagctacattggagaacgacccaactccaacatggtcattgttgatgtgaagatggtgtcaggcttcatacctgtgaagccatccgtgaaaaagctccaagaccagtctaacattcagaggactgaagtgaacaccaaccacgttctaatctacattgaaaagctaaccaatcaaaccatgggtttctccttcgcggtggaacaagacattccagtaaagaacttaaaaccagccccagtaaaagtctacgattattatgagacagatgaattcgccattgaagaatacagtgcccctttcagttctgactctgaacaaggaaatgcttaaaaataggaacctatagatttcctcagaaagactcctccacacgtgaagaaccaagacagcaagataaatggaaaggaattaaaaacccataaaatttatatgtt

SEQ ID NO: 269 - protein, 1500 aa, Rattus norvegicus
MRRNQLPIPVFLLLLLLLPRDATAATGKPRYVVLVPSELYAGVPEKVCVHLNHLNETVTLNVTLEYGVQYSNLLIDQAVDKDSSYCSSFTISRPLSPSALIAVEIKGPTHHFIKKKSMWITKAESPVFVQTDKPIYKPGQTVKFRVVSVDISFRPVNETFPVVYIENPKRNRIFQWQNVDLPGGLHQLSFPLSVEPALGIYKVVVQKDSGKKIEHSFEVKEYVLPKFEVQVKMPKTMAFLEEELVVTACGLYTYGKPVPGLVTMKVCRKYTQSYSNCHGQHSKSICEEFSKQADEKGCFRQVVKTKVFQPRQKGYDMKIEVEAKIKEDGTGIELTGTGSCEIANTLSKLKFTKANTFYRPGLPFFGQVLLVDEKGQPIPNKNLTVQVNSVRSQFTFTTDEHGLANILIDTTNFTFSFMGIRVIYKQNNICFDNWWVDEYHTQADHSAARIFSPSRSYIQLELVLGTLACGQTQEIRIHFLLNEDALKDAKDLTFYYLIKARGSIFNSGSHVFPLEQGKVKGVVSFPIRVEPGMAPVAKLIVYTILPNEELIADVQKFDIEKCFANTVNLSFPSAQSLPASDTHLTVKATPLSLCALTAVDQSVLLLKPEAKLSPQSIYNLLPQKAEQGAYLGPLPYKGGENCIKAEDITHNGIVYTPKQDLNDNDAYSVFQSIGLKIFTNTRVHKPRYCPMYQAYPPLPYVGEPQALAMSAIPGAGYRSSNIRTSSMMMMGASEVAQEVEVRETVRKYFPETWIWDMVPLDLSGDGELPVKVPDTITEWKASAFCLSGTTGLGLSSTISHKVFQPFFLELTLPYSVVRGEAFILKATVLNYMPHCIRIHVSLEMSPDFLAVPVGSHEDSHCICGNERKTVSWAVTPKSLGEVNFTATAEALQSPELCGNKVAEVPALVQKDTVVKPVIVEPEGIEKEQTYNTLLCPQDAELQENWTLDLPANVVEGSARATQSVLGDILGSAMQNLQNLLQMPYGCGEQNMVLFVPNIYVLEYLNETQQLTEAIKSKAISYLISGYQRQLNYQHSDGSYSTFGDRGMRHSQGNTWLTAFVLKAFAQAQSYIYIEKTHITNAFNWLSMKQRENGCFQQSGSLLNNAMKGGVDDEVTLSAYITIALLEMPLPVTHSVVRNALFCLETAWASISNSQESHVYTKALLAYAFALAGNRAKRSEVLESLNKDAVNEEESVHWQRPKNVEENVREMRSFSYKPRAPSAEVEMTAYVLLAYLTSASSRPTRDLSSSDLTTASKIVKWISKQQNSHGGFSSTQDTVVALQALSKYGAATFTKSNKEVSVTIESSGTVSGTLHVNNGNRLLLQEVRLADLPGNYITKVSGSGCVYLQTSLKYNILPEAEGEAPFTLKVNTLPLNFDKAEHHRKFQIHINVSYIGERPNSNMVIVDVKMVSGFIPVKPSVKKLQDQSNIQRTEVNTNHVLIYIEKLTNQTMGFSFAVEQDIPVKNLKPAPVKVYDYYETDEFAIEEYSAPFSSDSEQGNA

SEQ ID NO: 270 - DNA, 1018 bp, Rattus norvegicus
  CDS (66)..(953)
gctggaacgggtccgtacggcgttgttcttggttcccatcgtaacttaaaagggaaacttacacaatgtccggaggccttgacgtcctgcagatgaaggaggaggatgtcctcaaattccttgctgcaggaacccacttaggtggcaccaaccttgactttcagatggagcagtacatctacaaaaggaaaagtgacggtatctacatcatcaacctgaagaggacttgggagaagctgttgttagccgctcgagctattgttgccattgagaaccctgctgatgtcagcgtcatctcctccaggaacactggccagcgagctgtgctgaagtttgccgctgccacaggagccactccaattgctggccgcttcacacctgggaccttcactaaccagatccaagcagccttcagggagccccggcttctagtggtgactgatccccgggctgaccaccagcccctcacagaggcctcttacgtcaacctgcccaccattgctctttgtaacacagattctcccctgcgctatgtggacattgccatcccatgcaacaacaagggagctcactcagtgggtctcatgtggtggatgctggccagggaagtactccgcatgcgaggaaccatctcccgggagcacccatgggaggttatgcctgatctttacttctacagggacccagaggagattgagaaggaggagcaggctgccgctgagaaggctgtgaccaaggaggaattccagggtgaatggacggcaccagcgcctgagttcactgctgctcagcctgaggtggccgactggtctgagggtgtgcaggtgccctctgtgcccattcagcagttccccacagaagactggagtgcacagccggccactgaggactggtcagcagctcccacagcacaggctactgagtgggttggagccaccactgagtggtcctgagctcctctgcaggtgcctgagcgaagggaaaaaaggtggaaggaaaataaagttcctgaaagctg

SEQ ID NO: 271 - protein, 295 aa, Rattus norvegicus
MSGGLDVLQMKEEDVLKFLAAGTHLGGTNLDFQMEQYIYKRKSDGIYIINLKRTWEKLLLAARAIVAIENPADVSVISSRNTGQRAVLKFAAATGATPIAGRFTPGTFTNQIQAAFREPRLLVVTDPRADHQPLTEASYVNLPTIALCNTDSPLRYVDIAIPCNNKGAHSVGLMWWMLAREVLRMRGTISREHPWEVMPDLYFYRDPEEIEKEEQAAAEKAVTKEEFQGEWTAPAPEFTAAQPEVADWSEGVQVPSVPIQQFPTEDWSAQPATEDWSAAPTAQATEWVGATTEWS

SEQ ID NO: 272 - DNA, 2275 bp, Rattus norvegicus
  CDS (18)..(2105)
ccacacacaccgagaggatgaggttcgctgtgggtgccctgctggcttgtgccgccctgggactgtgtctggctgtccctgacaaaacggtcaaatggtgcgcagtgtctgagcatgagaacaccaagtgtatcagtttccgtgaccacatgaaaaccgtccttccagctgatggcccccgcttgccctgtgtgaagaaaacctcctatcaagattgcatcaaggccatttctggaggtgaagctgatgccattaccttggatgggggttgggtgtacgatgcaggcctgactcccaacaacctgaagcctgtggcagcagagttttatggatcacttgaacatcgacagacccactacttggctgtggccgtggtgaagaagggaacagacttccagctgaaccagctccagggcaagaagtcctgccacactggcctgggcaggtctgcaggctggattatccccattggcttacttttctgtaacttgccagagccccgcaagcctcttgagaaagctgtggccagtttcttctcgggcagttgtgtcccctgtgcagatccagtggccttcccccagctgtgtcaactgtgtccaggctgtggctgctccccgactcaaccgttctttggctacgtaggcgccttcaagtgtctgagagatggaggtggagatgtggcctttgtcaagcatacaaccatatttgaggtcttgccacagaaggctgacagggatcaatatgagctgctctgccttgacaatacccgcaagccagtggatcagtatgaggactgctacctagcccggatcccttctcatgctgttgtggctcgaaatggagatggcaaagaggacttgatctgggagatcctcaaagtggctcaggaacactttggcaaaggcaaatcaaaagacttccaactgttcggctctcctcttgggaaagacctgctgtttaaggattctcgctttgggctgttacgtgcccccaaggatggactacaggctgtacctcggccacagctatgtcactgccattcgaaatcagcgggaagctgtccggatgccatcgacagcgcgccagtgaaatggtgtgcactgagtcaccaagagagagccaagtgtgatgagtggagcgtcacaggcaatgggcagatagagtgtgagtcagcagagagcactgaggactgcattgacaagattgtgaatggagaagcagatgccatgagcttggatggaggtcatgcctacatagcaggccagtgtggactagtgcccgtcatggcagagaactatgatatctcttcgtgtacaaacccacaatcagatgtctttcctaaagggtattatgccgtggctgtggtgaaggcatcagactccagcatcaactggaacaacctgaaaggcaagaagtcctgccatactggagtagacagaaccgccggctggaacatccctatgggcctgctgttcagcaggatcaaccactgcaagttcgatgaatttttcagtcaaggctgtgctcctggctataagaagaattccaccctctgtgacctgtgtattggcccagcaaaatgtgctccgaacaacagagagggatataatggttatacaggggctttccagtgcctcgttgagaagggagacgtagcctttgtgaagcaccagactgtcctggaaaacacgaacggaaagaacactgctgcatgggctaaggatctgaagcaggaagacttccagctgctgtgccctgatggtaccaagaagcctgtaaccgagttcgccacctgccacctggcccaagctccaaaccatgttgtggtctcacgaaaagagaaggcagcccgggttagcactgtgctgactgcccagaaggatttattttggaaaggtgacaaggactgcactggcaatttctgtttgttccggtcttccaccaaggaccttctgttcagagatgacaccaagtgtttgactaaacttccagaaggtaccacatatgaagagtacttaggagcagagtacttgcaagctgttggaaacataaggaagtgttcaacctcacgactcctagaagcctgcactttccacaaaagttaaaatccaagaggtgggtgccactgtggtggaggaggatgcccccgtgatccatgggcttctcctggcctccatgccctgagcggctggggctaactgtgtccgtcttcactgctgtgtgttaccacatacacagagcacaaaataaaaaatgactgttgactttaaaaaaa

SEQ ID NO: 273 - protein, 695 aa, Rattus norvegicus
MRFAVGALLACAALGLCLAVPDKTVKWCAVSEHENTKCISFRDHMKTVLPADGPRLPCVKKTSYQDCIKAISGGEADAITLDGGWVYDAGLTPNNLKPVAAEFYGSLEHRQTHYLAVAVVKKGTDFQLNQLQGKKSCHTGLGRSAGWIIPIGLLFCNLPEPRKPLEKAVASFFSGSCVPCADPVAFPQLCQLCPGCGCSPTQPFFGYVGAFKCLRDGGGDVAFVKHTTIFEVLPQKADRDQYELLCLDNTRKPVDQYEDCYLARIPSHAVVARNGDGKEDLIWEILKVAQEHFGKGKSKDFQLFGSPLGKDLLFKDSRFGLLRAPKDGLQAVPRPQLCHCHSKSAGSCPDAIDSAPVKWCALSHQERAKCDEWSVTGNGQIECESAESTEDCIDKIVNGEADAMSLDGGHAYIAGQCGLVPVMAENYDISSCTNPQSDVFPKGYYAVAVVKASDSSINWNNLKGKKSCHTGVDRTAGWNIPMGLLFSRINHCKFDEFFSQGCAPGYKKNSTLCDLCIGPAKCAPNNREGYNGYTGAFQCLVEKGDVAFVKHQTVLENTNGKNTAAWAKDLKQEDFQLLCPDGTKKPVTEFATCHLAQAPNHVVVSRKEKAARVSTVLTAQKDLFWKGDKDCTGNFCLFRSSTKDLLFRDDTKCLTKLPEGTTYEEYLGAEYLQAVGNIRKCSTSRLLEACTFHKS

SEQ ID NO: 274 - DNA, 2293 bp, Rattus norvegicus
  CDS (31)..(2127)
cgtccgctcctcgccacacacaccgagaggatgaggttcgctgtgggtgccctgctggcttgtgccgccctgggactgtgtctggctgtccctgacaaaacggtcaaatggtgcgcagtgtctgagcatgagaacaccaagtgtatcagtttccgtgaccacatgaaaaccgtccttccagctgatggcccccggcttgcctgtgtgaagaaaacctcctatcaagattgcatcaaggccatttctggaggtgaagctgatgccattaccttggatgggggttgggtgtacgatgcaggcctgactcccaacaacctgaagcctgtggcagcagagttttatggatcacttgaacatccacagacccactacttggctgtggccgtggtgaagaagggaacagacttccagctgaaccagctccagggcaagaagtcctgccacactggcctgggcaggtctgcaggctggattatccccattggcttacttttctgtaacttgccagagccccgcaagcctcttgagaaagctgtggccagtttcttctcgggcagttgtgtcccctgtgcagatccagtggccttcccccagctgtgtcaactgtgtccaggctgtggctgctccccgactcaaccgttctttggctacgtaggcgccttcaagtgtctgagagatggaggtggagatgtggcctttgtcaagcatacaaccatatttgaggtcttgccacagaaggctgacagggatcaatatgagctgctctgccttgacaatacccgcaagccagtggatcagtatgaggactgctacctagcccggatcccttctcatgctgttgtggctcgaaatggagatggcaaagaggacttgatctgggagatcctcaaagtggctcaggaacactttggcaaaggcaaatcaaaagacttccaactgttcggctctcctcttgggaaagacctgctgtttaaggattctgcctttggctgttacggggtgcccccaaggatggactacaggctgtacctcggccacagctatgtcactgccattcgaaatcagcgggaaggcgtgtgcccggaggcctccatcgacagcgcgccagtgaaatggtgtgcactgagtcaccaagagagagccaagtgtgatgagtggagcgtcacgagcaatgggcagatagagtgtgagtcagcagagagcactgaggactgcattgacaagattgtgaatggagaagcagatgccatgagcttggatggaggtcatgcctacatagcaggccagtgtggactagtgcccgtcatggcagagaactatgatatctcttcgtgtacaaacccacaatcagatgtctttcctaaagggtattatgccgtggctgtggtgaaggcatcagactccagcatcaactggaacaacctgaaaggcaagaagtcctgccatactggagtagacagaaccgccggctggaacatccctatgggcctgctgttcagcaggatcaaccactgcaagttcgatgaatttttcagtcaaggctgtgctcctggctataagaagaattccaccctctgtgacctgtgtattggcccagcaaaatgtgctccgaacaacagagagggatataatggttatacaggggctttccagtgcctcgttgagaagggagacgtagcctttgtgaagcaccagactgtcctggaaaacacgaacggaaagaacactgctgcatgggctaaggatctgaagcaggaagacttccagctgctgtgccctgatggtaccaagaagcctgtaaccgagttcgccacctgccacctggcccaagctccaaaccatgttgtggtctcacgaaaagagaaggcagcccgggttagcactgtgctgactgcccagaaggatttattttggaaaggtgacaaggactgcactggcaatttctgtttgttccggtcttccaccaaggaccttctgttcagagatgacaccaagtgtttgactaaacttccagaaggtaccacatatgaagagtacttaggagcagagtacttgcaagctgttggaaacataaggaagtgttcaacctcacgactcctagaagcctgcactttccacaaaagttaaaatccaagaggtgggtgccactgtggtggaggaggatgcccccgtgatccatgggcttctcctggcctccatagccctgagcggctggggctaactgtgtccgtcttactgcttggtgttgttaccacatacacagagcacaaaataaaaaatgactgttgacttt

SEQ ID NO: 275 - protein, 698 aa, Rattus norvegicus
MRFAVGALLACAALGLCLAVPDKTVKWCAVSEHENTKCISFRDHMKTVLPADGPRLACVKKTSYQDCIKAISGGEADAITLDGGWVYDAGLTPNNLKPVAAEFYGSLEHPQTHYLAVAVVKKGTDFQLNQLQGKKSCHTGLGRSAGWIIPIGLLFCNLPEPRKPLEKAVASFFSGSCVPCADPVAFPQLCQLCPGCGCSPTQPFFGYVGAFKCLRDGGGDVAFVKHTTIFEVLPQKADRDQYELLCLDNTRKPVDQYEDCYLARIPSHAVVARNGDGKEDLIWEILKVAQEHFGKGKSKDFQLFGSPLGKDLLFKDSAFGCYGVPPRMDYRLYLGHSYVTAIRNQREGVCPEASIDSAPVKWCALSHQERAKCDEWSVTSNGQIECESAESTEDCIDKIVNGEADAMSLDGGHAYIAGQCGLVPVMAENYDISSCTNPQSDVFPKGYYAVAVVKASDSSINWNNLKGKKSCHTGVDRTAGWNIPMGLLFSRINHCKFDEFFSQGCAPGYKKNSTLCDLCIGPAKCAPNNREGYNGYTGAFQCLVEKGDVAFVKHQTVLENTNGKNTAAWAKDLKQEDFQLLCPDGTKKPVTEFATCHLAQAPNHVVVSRKEKAARVSTVLTAQKDLFWKGDKDCTGNFCLFRSSTKDLLFRDDTKCLTKLPEGTTYEEYLGAEYLQAVGNIRKCSTSRLLEACTFHKS

SEQ ID NO: 276 - DNA, 2424 bp, Rattus norvegicus
  CDS (718)..(760)
  CDS (913)..(1066)
  CDS (1619)..(2198)
tccccaaactcgggagaccagggtgaagcgaaagggggaacctcttggaatgcaacgaaactttgaggcggggatgtgagttcaggagcccaaaattcctcactcttcctaccctgctccaggttcagggcactagcaacacagaggagcccaggagtggactacatgagactaactaaaagaacacatataccgcaggatggggcaactgccttaccccctggggacccttggagtctgcagctactccccgctgcccccacctgaacccttgatcccagctctgcagcccccgcagcttcctgtttgcccactctgtttgcctagcctcgggaacagagctgatccttgaactctaagttccacatcgccagcaaaagtaagcagtgacagggccagcctgagcttatcagtctcccagcccaggccctgcccacacacatatataggtcagggaagaagacctggacacccagactgttggagagctccgggggaggtaagtgctgctacctaccctaggctacttcttagttccctcatgcctcccagtggatgccccactgtccaaagcaataccatggatatctgggatctgtccccactccagatagttcttctactgggttgaatgtgtgtggcacctctccatggcagcacctcccttcagtgcagccattcttcttcttcttctccaggtcgcccacatccttcaggatgaaagctgcagtgttggctgtggccctggtcttcctgacaggtgggtgcctcttggtctccatggactaactccctccctgggcacagagagaacagaattcccactgctctcctccaaggctccaagtctgacatgtcagctcaggccccagcccagagttgacctaacatgggtctcctctccatcctcaggttgccaagcttgggagttctggcagcaagatgagccccagtcccaatgggacagggtgaaggatttcgccactgtgtatgtggatgcagtcaaggacagcggcagagactatgtgtcccagtttgaatcctccactttgggcaaacagctgaagtaaggaaggacctagtgtgggtcctggagcagggcaagggctgcccatccagggtgggcagaggaaccctgtaagaatgatcctgtaactgagctggctagaccttcacctgctttcctaccagctgggcaccatggaggattccaatgggaggactagagatgggattcatctggttgtagggtaaccagcctgtggattcaaaatcccttttccttggtaacccccagtactggtcagacagcacaaaaaaaaaaaaaaaaaaaagacaaaaaaccaaaaccaacaacaacaacaaaaatgggactggccttgcaactggcaccaaccacatctgtgatcttggtgcctcaggccatgtgtacagagggatgggaagggaggaagggagttatagggagttatagagttcagggaaactaggagcatagcaactactattggaacaggtggcacctaggcctgaccccaggtatcatgtgcatggatctgcagaccaggggagtgcaggatgcctggggtcatctctcagctgctctcttcccctctagcctgaatctcctggacaactgggacactctgggttcaactgttggtcgcctacaggaacagctaggcccagtgactcaggagttctgggctaacctggagaaagaaacagattggctgagaaacgagatgaacaaggacctggagaatgtgaaacagaagatgcagccccacctggatgaattccaggagaagtggaacgaggaggtcgaggcctaccgccagaagctggagcctctgggcaccgagcttcacaaaaacgcgaaggagatgcaaaggcatctaaaggttgtggccgaggagtttcgagaccgcatgcgtgtgaatgcagacgcgctgcgcgcaaagtttgggctctacagcgatcagatgcgcgagaacctggcccagcgcctgaccgagatcaagaaccaccctaccctgatcgagtatcataccaaggccagcgaccacctgaagacacttggtgagaaagccaaacccgcgctggatgacctgggccagggcctgatgccggtgctggaagcctggaaggccaaaatcatgagtatgatcgatgaggccaaaaagaagctgaacgcttagtgaggcgcccgtcaccactccccacccctgaattggctttcttacaataaacgtttccaaagtggaatgacttctttctttgggtgacatagggaggacgctaaggggacatcaagggatatggaaagatggtgctgcggtgagggttcctttgtacggggctactcagctcttcaagctcactcaagctgggcacctggctggtttagagtatgagacacaa

SEQ ID NO: 277 - protein, 259 aa, Rattus norvegicus
MKAAVLAVALVFLTGCQAWEFWQQDEPQSQWDRVKDFATVYVDAVKDSGRDYVSQFESSTLGKQLNLNLLDNWDTLGSTVGRLQEQLGPVTQEFWANLEKETDWLRNEMNKDLENVKQKMQPHLDEFQEKWNEEVEAYRQKLEPLGTELHKNAKEMQRHLKVVAEEFRDRMRVNADALRAKFGLYSDQMRENLAQRLTEIKNHPTLIEYHTKASDHLKTLGEKAKPALDDLGQGLMPVLEAWKAKIMSMIDEAKKKLNA

SEQ ID NO: 278 - DNA, 1978 bp, Rattus norvegicus
  CDS (432)..(474)
  CDS (623)..(773)
  CDS (1313)..(1892)
gctcggcagcccccgcagtttcctgtttgccactctgtttgcccagcctcaggaacagagctgatccttgaactctaagttccacatcgccagcaaaagtaagcagtgcagggccaggctgagcttatcagtctcccagcccagcccctgcccacacacatatatagaccagggaagaagagctggacacccagactgtcggagagctccggggaggtaagtgctgctacctgccttcggtggctctgctccatagcgcctcccagtggatgccccactgtccaaagcaataccatggatatctgggatctgtccccactccagatagttcttctactgggttgaatgtgtgtggcacctctccatggcagcacctcccttcagtgcagccattcttcttcttcttctccaggtcgcccacatccttcaggatgaaagctgcagtgttggctgtggccctggtcttcctgacaggtgggtgcctcttggtctccatggactaactccctccctgggcacagagaacagaattcccactgctctcctccaaggctccaagtctgacatgtcggctcagccccagccagagttgacctaacatgggtctcctctccatcctcaggttgccaagcttgggagttctggcagcaagatgagccatcgcaatgggacagggtgaaggatttcgccactgtgtatgtggatgcagtcaaggacagcggcagagactatgtgtcccagtttgaatcctccactttgggcaaacagctgaagtaaggaaggacctagtgtgggtcctggagcagggcaagggctgcccatccagggtgggcagaggaaccctgtaagaagatcctgtaactgagctggctagaccttcacctgctttcctaccagctgggcaccatggaggattccaatgggaggactagagatgggattcatctggttgtggggtaaccagcctgtggattcaaaatcccttttccttggtaacccccagtactggtcagacagcacaaaaaaaaagacaaaaaaccaaaaccaacaacaacaacaaaaatgggactggccttgcaactggcaccaaccacatctgtgatcttggtgcctcaggccatgtgtacagagggatgggaagggaggaagggagttatagggagttatagagttcagggaaactaggagcatagcaactactattggaacaggtgcacctaggctgaccccaggtatcatgtgcatggatctgcagaccaggggcagtgcaggatgcctggggtcatctctcagctgctctcttcccctctagcctgaatctcctggacaactgggacactctgggttcaactgttggtcgcctacaggaacagctaggcccagtgactcaggacttctgggctaacctggagaaagaaacagattggccgagaaacgagatgaacaaggacctggagaatgtgaaacagaagatgcagccccacctggatgaattccaggagaagtggaacgaggaggtcgaggcctaccgccagaagctggagcctctggcgaccgagcttcacaaaaacgcgaaggagatgcaaaggcatctaaaggttgtggccgaggagtttcgagaccgcatgcgtgtgaatgcagacgcgctgcgcgcaaagtttgggctctacagcgatcagatgcgcgagaacctggcccagcgcctgaccgagatcaagaaccaccctaccctgatcgagtatcataccaaggccagcgaccacctgaagacacttggtgagaaagccaaacccgcgctggatgacctgggccagggcctgatgccggtgctggaagccgtgaaggccaaaatcatgagtatgattgatgaggccaaaaagaagctgaacgcttagtgaggcgccgtcaccactccccacccctgaattggctttcttacaataaacgtttccaaagtggaatgacttctttctttggg

SEQ ID NO: 279 - protein, 258 aa, Rattus norvegicus
MKAAVLAVALVFLTGCQAWEFWQQDEPSQWDRVKDFATVYVDAVKDSGRDYVSQFESSTLGKQLNLNLLDNWDTLGSTVGRLQEQLGPVTQDFWANLEKETDWPRNEMNKDLENVKQKMQPHLDEFQEKWNEEVEAYRQKLEPLATELHKNAKEMQRHLKVVAEEFRDRMRVNADALRAKFGLYSDQMRENLAQRLTEIKNHPTLIEYHTKASDHLKTLGEKAKPALDDLGQGLMPVLEAVKAKIMSMIDEAKKKLNA

SEQ ID NO: 280 - DNA, 1991 bp, Rattus norvegicus
  CDS (432)..(474)
  CDS (623)..(773)
  CDS (1326)..(1905)
gctcggcagcccccgcagtttcctgtttgccactctgtttgcccagcctcaggaacagagctgatccttgaactctaagttccacatcgccagcaaaagtaagcagtgcagggccaggctgagcttatcagtctcccagcccagcccctgcccacacacatatatagaccagggaagaagagctggacacccagactgtcggagagctccggggaggtaagtgctgctacctgccttcggtggctctgctccatagcgcctcccagtggatgccccactgtccaaagcaataccatggatatctgggatctgtccccactccagatagttcttctactgggttgaatgtgtgtggcacctctccatggcagcacctcccttcagtgcagccattcttcttcttcttctccaggtcgcccacatccttcaggatgaaagctgcagtgttggctgtggccctggtcttcctgacaggtgggtgcctcttggtctccatggactaactccctccctgggcacagagaacagaattcccactgctctcctccaaggctccaagtctgacatgtcggctcagccccagccagagttgacctaacatgggtctcctctccatcctcaggttgccaagcttgggagttctggcagcaagatgagccatcgcaatgggacagggtgaaggatttcgccactgtgtatgtggatgcagtcaaggacagcggcagagactatgtgtcccagtttgaatcctccactttgggcaaacagctgaagtaaggaaggacctagtgtgggtcctggagcagggcaagggctgcccatccagggtgggcagaggaaccctgtaagaagatcctgtaactgagctggctagaccttcacctgctttcctaccagctgggcaccatggaggattccaatgggaggactagagatgggattcatctggttgtggggtaaccagcctgtggattcaaaatcccttttccttggtaacccccagtactggtcagacagcacaaaaaaaaaaaaaaaaaaaaaagacaaaaaaccaaaaccaacaacaacaacaaaaatgggactggccttgcaactggcaccaaccacatctgtgatcttggtgcctcaggccatgtgtacagagggatgtgaagggaggaagggagttatagggagttatagagttcagggaaactaggagcatagcaactactattggaacaggtgcacctaggctgaccccaggtatcatgtgcatggatctgcagaccaggggcagtgcaggatgcctggggtcatctctcagctgctctcttcccctctagcctgaatctcctggacaactgggacactctgggttcaactgttggtcgcctacaggaacagctaggcccagtgactcaggacttctgggctaacctggagaaagaaacagattggccgagaaacgagatgaacaaggacctggagaatgtgaaacagaagatgcagccccacctggatgaattccaggagaagtggaacgaggaggtcgaggcctaccgccagaagctggagcctctggcgaccgagcttcacaaaaacgcgaaggagatgcaaaggcatctaaaggttgtggccgaggagtttcgagaccgcatgcgtgtgaatgcagacgcgctgcgcgcaaagtttgggctctacagcgatcagatgcgcgagaacctggcccagcgcctgaccgagatcaagaaccaccctaccctgatcgagtatcataccaaggccagcgaccacctgaagacacttggtgagaaagccaaacccgcgctggatgacctgggccagggcctgatgccggtgctggaagcctggaaggccaaaatcatgagtatgatcgatgaggccaaaaagaagctgaacgcttagtgaggcgccgtcaccactccccacccctgaattggctttcttacaataaacgtttccaaagtggaatgacttctttctttggg

SEQ ID NO: 281 - protein, 258 aa, Rattus norvegicus
MKAAVLAVALVFLTGCQAWEFWQQDEPSQWDRVKDFATVYVDAVKDSGRDYVSQFESSTLGKQLNLNLLDNWDTLGSTVGRLQEQLGPVTQDFWANLEKETDWPRNEMNKDLENVKQKMQPHLDEFQEKWNEEVEAYRQKLEPLATELHKNAKEMQRHLKVVAEEFRDRMRVNADALRAKFGLYSDQMRENLAQRLTEIKNHPTLIEYHTKASDHLKTLGEKAKPALDDLGQGLMPVLEAWKAKIMSMIDEAKKKLNA

SEQ ID NO: 282 - DNA, 1988 bp, Rattus norvegicus
  CDS (432)..(474)
  CDS (623)..(773)
  CDS (1324)..(1903)
gctcggcagcccccgcagtttcctgtttgccactctgtttgcccagcctcaggaacagagctgatccttgaactctaagttccacatcgccagcaaaagtaagcagtgcagggccaggctgagcttatcagtctcccagcccagcccctgcccacacacatatatagaccagggaagaagagctggacacccagactgtcggagagctccggggaggtaagtgctgctacctgccttcggtggctctgctccatagcgcctcccagtggatgccccactgtccaaagcaataccatggatatctgggatctgtccccactccagatagttcttctactgggttgaatgtgtgtggcacctctccatggcagcacctcccttcagtgcagccattcttcttcttcttctccaggtcgcccacatccttcaggatgaaagctgcagtgttggctgtggccctggtcttcctgacaggtgggtgcctcttggtctccatggactaactccctccctgggcacagagaacagaattcccactgctctcctccaaggctccaagtctgacatgtcggctcagccccagccagagttgacctaacatgggtctcctctccatcctcaggttgccaagcttgggagttctggcagcaagatgagccatcgcaatgggacagggtgaaggatttcgccactgtgtatgtggatgcagtcaaggacagcggcagagactatgtgtcccagtttgaatcctccactttgggcaaacagctgaagtaaggaaggacctagtgtgggtcctggagcagggcaagggctgcccatccagggtgggcagaggaaccctgtaagaagatcctgtaactgagctggctagaccttcacctgctttcctaccagctgggcaccatggaggattccaatgggaggactagagatgggattcatctggttgtagggtaaccagcctgtggattcaaaatcccttttccttggtaacccccagtactggtcagacagcacaaaaaaaaaaaaaaaaaaaagacaaaaaaccaaaaccaacaacaacaacaaaaatgggactggccttgcaactggcaccaaccacatctgtgatcttggtgcctcaggccatgtgtacagagggatgggaagggaggaagggagttatagggagttatagagttcagggaaactaggagcatagcaactactattggaacaggtgcacctaggctgaccccaggtatcatgtgcatggatctgcagaccaggggcagtgcaggatgcctggggtcatctctcagctgctctcttcccctctagcctgaatctcctggacaactgggacactctgggttcaactgttggtcgcctacaggaacagctaggcccagtgactcaggacttctgggctaacctggagaaagaaacagattggccgagaaacgagatgaacaaggacctggagaatgtgaaacagaagatgcagccccacctggatgaattccaggagaagtggaacgaggaggtcgaggcctaccgccagaagctggagcctctggcgaccgagcttcacaaaaacgcgaaggagatgcaaaggcatctaaaggttgtggccgaggagtttcgagaccgcatgcgtgtgaatgcagacgcgctgcgcgcaaagtttgggctctacagcgatcagatgcgcgagaacctggcccagcgcctgaccgagatcaagaaccaccctaccctgatcgagtatcataccaaggccagcgaccacctgaagacacttggtgagaaagccaaacccgcgctggatgacctgggccagggcctgatgccggtgctggaagcctggaaggccaaaatcatgagtatgatcgatgaggccaaaaagaagctgaacgcttagtgaggcgccgtcaccactccccacccctgaattggctttcttacaataaacgtttccaaagtggaatgacttctttctttgg

SEQ ID NO: 283 - protein, 258 aa, Rattus norvegicus; identical to SEQ ID NO: 281

SEQ ID NO: 284 - DNA, 2424 bp, Rattus norvegicus; identical to SEQ ID NO: 276
  CDS (718)..(760)
  CDS (913)..(1066)
  CDS (1619)..(2198)

SEQ ID NO: 285 - protein, 259 aa, Rattus norvegicus; identical to SEQ ID NO: 277

SEQ ID NO: 286 - DNA, 889 bp, Rattus norvegicus
  CDS (44)..(823)
agactgttggagagctccgggggaggtcgccacatccttcaggatgaaagctgcagtgttggctgtggccctggtcttcctgacaggttgccaagcttgggagttctggcagcaagatgagccccagtcccaatgggacagggtgaaggatttcgccactgtgtatgtggatgcagtcaaggacagcggcagagactatgtgtcccagtttgaatcctccactttgggcaaacagctgaacctgaatctcctggacaactgggacactctgggttcaactgttggtcgcctacaggaacagctaggcccagtgactcaggagttctgggctaacctggagaaagaaacagattggctgagaaacgagatgaacaaggacctggagaatgtgaaacagaagatgcagccccacctggatgaattccaggagaagtggaacgaggaggtcgaggcctaccgccagaagctggagcctctgggcaccgagcttcacaaaaacgcgaaggagatgcaaaggcatctaaaggttgtggccgaggagtttcgagaccgcatgcgtgtgaatgcagacgcgctgcgcgcaaagtttgggctctacagcgatcagatgcgcgagaacctggcccagcgcctgaccgagatcaagaaccaccctaccctgatcgagtatcataccaaggccagcgaccacctgaagacacttggtgagaaagccaaacccgcgctggatgacctgggccagggcctgatgccggtgctggaagcctggaaggccaaaatcatgagtatgatcgatgaggccaaaaagaagctgaacgcttagtgaggcgcccgtcaccactccccacccctgaattggctttcttacaataaacgtttccaaagtggg

SEQ ID NO: 287 - protein, 259 aa, Rattus norvegicus; identical to SEQ ID NO: 277

SEQ ID NO: 288 - DNA, 877 bp, Rattus norvegicus
  CDS (33)..(812)
agctccgggggaggtcgcccacatccttcgggatgaaagctgcagtgttggctgtggccctggtcttcctgacaggttgccaagcttgggagttctggcagcaagatgagccccagtcccaatgggacagggtgaaggatttcgccactgtgtatgtggatgcagtcaaggacagcggcagagactatgtgtcccagtttgaatcctccactttgggcaaacagctgaacctgaatctcctggacaactgggacactctgggttcaactgttggtcgcctacaggaacagctaggcccagtgactcaggagttctgggctaacctagagaaagaaacagattggctgagaaacgagatgaacaaggacctggagaatgtgaaacagaagatgcagccccacctagatgaattccaggagaagtggaacgaggaggtcgaggcctaccgccagaagctggagcctctgggcaccgagcttcacaaaaacgcgaaggagatgcaaaggcatctaaaggttgtggccgaggagtttcgagaccgcatgcgtgtgaatgcagacgcgctgcgcgcaaagtttgggctctacagcgatcagatgcgcgagaacctggcccagcgcctgaccgagatcaggaaccaccctaccctgatcgagtatcataccaaggccggcgaccacctgaggacacttggtgagaaggccaaacccgcgctggatgacctaggccagggcctgatgccggtgctggaagcctggaaggccaaaatcatgagtatgatcgatgaggccaaaaagaagctgaacgcttagtgaggcgcccgtcaccactccccacccctgaattggctttcttacaataaacgtttccaaagtgg

SEQ ID NO: 289 - protein, 259 aa, Rattus norvegicus
MKAAVLAVALVFLTGCQAWEFWQQDEPQSQWDRVKDFATVYVDAVKDSGRDYVSQFESSTLGKQLNLNLLDNWDTLGSTVGRLQEQLGPVTQEFWANLEKETDWLRNEMNKDLENVKQKMQPHLDEFQEKWNEEVEAYRQKLEPLGTELHKNAKEMQRHLKVVAEEFRDRMRVNADALRAKFGLYSDQMRENLAQRLTEIRNHPTLIEYHTKAGDHLRTLGEKAKPALDDLGQGLMPVLEAWKAKIMSMIDEAKKKLNA

SEQ ID NO: 290 - DNA, 530 bp, Rattus norvegicus
  CDS (61)..(378)
ggatccatttccatcgggttctgccgaaactcgtgtggctccctccccgcaacagccaaaatggtgaagctgatcgagagcaaggaagcttttcaggaggccctggccgctgcgggagacaagcttgtggtagtggacttctctgccacgtggtgtggaccttgcaaaatgatcaagcccttctttcattccctctgtgacaagtattccaatgtggtgttccttgaagtagacgtggatgactgccaggatgttgctgcagactgtgaagtcaaatgcatgccgaccttccagttctataaaaagggtcaaaaggttggggagttctctggtgctaacaaggaaaagctcgaagccactattacggagtttgcctaatcatgctctgaaaagtgtgaccagctccagcaggttaaaacctgtaccttttttaatttgcaaaaataacctatgaagtgtggagagtctatacccaactgccatctgattataaatgacaataaaatattaattctaccctttttaaaaaa

SEQ ID NO: 291 - protein, 105 aa, Rattus norvegicus
MVKLIESKEAFQEALAAAGDKLVVVDFSATWCGPCKMIKPFFHSLCDKYSNVVFLEVDVDDCQDVAADCEVKCMPTFQFYKKGQKVGEFSGANKEKLEATITEFA

SEQ ID NO: 292 - DNA, 1266 bp, Rattus norvegicus
  CDS (39)..(1043)
ctttgctggtgcagagatcggccttgcagtttgcaataatgtctgagccaatcagagtcctcgtgacaggagcagccggtcagattgcatattcgctgctgtacagcattggaaatggatctgtctttgggaaagaccagcccatcattcttgtgctgttggacatcacccccatgatgggtgttctggacggtgtcctgatggagctgcaagactgtgcccttccccttctgcaggatgtcattgcaacagacaaagaagaggttgccttcaaagacctggacgtggctgtccttgtgggctccatgccaagaagggagggcatggagaggaaggacctactgaaagccaacgtgaagatcttcaaatcccagggcgcagccttggagaagtacgccaagaaatcagttaaggtcattgttgtggggaacccagccaatacaaactgcctgacggcctccaagtcagcaccatcgatccccaaggagaacttcagttgcctgactcgattggaccacaaccgagcaaaatctcaaattgctcttaaactcggtgtaaccgctgatgatgtaaaaaatgtcattatctggggaaatcattcatcaacccagtatccagatgtcaatcatgccaaggtgaaattgcaaggaaaagaagttggtgtgtatgaagccctcaaagacgacagctggctcaagggagagttcatcacgactgtgcagcagcgtggtgctgctgtcatcaaggctcggaagctgtccagtgccatgtctgctgcgaaggccatctcggaccacatcagagacatctggtttggaaccccggagggcgagttcgtgtcgatgggcgtaatctctgatggcaactcctatggtgtccctgatgacctgctctactcgttccctgtcgtgatcaagaataagacctggaagtttgttgaaggcctccccattaacgacttctcccgtgagaagatggacctgacagcaaaggagctgaccgaggaaaaggaaacggcttttgagtttctctcctccgcatgactacacagtcgtgttgacgtcagcagacatcccaaggctgaggaatcaaaatgtcgtctttgagcctagtaccaaacagtaataatggtacattcagattgtgaacagcaaaatattttaaatattatgtgctttgtgattcgtgaaagtctatcacgttgttagtgctgcgatctaaataaaagtatattcaagtgaaaaaaaaaaaaaaaaaaaaaaaaaa

SEQ ID NO: 293 - protein, 334 aa, Rattus norvegicus
MSEPIRVLVTGAAGQIAYSLLYSIGNGSVFGKDQPIILVLLDITPMMGVLDGVLMELQDCALPLLQDVIATDKEEVAFKDLDVAVLVGSMPRREGMERKDLLKANVKIFKSQGAALEKYAKKSVKVIVVGNPANTNCLTASKSAPSIPKENFSCLTRLDHNRAKSQIALKLGVTADDVKNVIIWGNHSSTQYPDVNHAKVKLQGKEVGVYEALKDDSWLKGEFITTVQQRGAAVIKARKLSSAMSAAKAISDHIRDIWFGTPEGEFVSMGVISDGNSYGVPDDLLYSFPVVIKNKTWKFVEGLPINDFSREKMDLTAKELTEEKETAFEFLSSA

SEQ ID NO: 294 - DNA, 1710 bp, Rattus norvegicus
  CDS (55)..(594)
caccatcagcagagagattgtcccgacagagaggcaattctattccctaccaacatgaagctgttgctgctgctgctgtgtctgggcctgaccctggtctgtggccatgcagaagaagctagtttcgagagagggaacctcgatgtggacaagctcaatggggattggttttctattgtcgtggcctctgataaaagagaaaagatagaagagaacggcagcatgagagtttttgtgcagcatatcgatgtcttggagaattccttaggcttcacgttccgtattaaggaaaatggagtgtgcacagaattttctttggttgccgacaaaacagcaaaggatggcgaatattttgttgagtatgacggagagaatacatttactatacttaagacagactatgacaattatgtcatgtttcatctcgttaatgtcaacaacggggaaaccttccagctgatggagctctatggcagaacaaaggatctgagttcagacatcaaggaaaagtttgcaaaactatgtgtggcacatggaatcactagggacaatatcattgacctaaccaagactgatcgctgtctccaggcctgaggttgaagaaaggcctgagcctccaggtgggcaatctccagtgagagcaaggtgggggtgggcatggaccaggccttccaaaagcattattattgtgcccccaaattattataagaatgatttgataaggagtctttgaggagggcttgaaaaatggctttgaattatgtggatttgtgaggatcttgccctattttgagctctaaagcaaagtgacccaagcacttaggcaagaaaacaagggtgtgagttttcgatagttgctgcatggttgtgtaaaaagggctcagcagtgtgttaagtgtcattaagagttaaagtttgaaacagagagtagcaggatgtgagtatgactgctcttcagagactgcggtccatctccagtcccactctgcacaatacagtctcaagtctgaactccgtacaaccttggcttcttacctggaagtggagttacatgttctccacttctcctacagtctggagagcacactcctctgacccctctttcccatttcccaagacttcactcaggcaatgtatgaaagtctttaaaagtggcaaggttttcaccattattcctcaaggcaatgaccattcttcagagcttcttatgccgaaggttgtggaaacaagcctcacctttcgttacttcatttttcataggccttccataaggaaagagtcatttattctatgcctttcctccctgttttctgacaaataatgttgattagattgcagggcaagatctatttcttcatcctttgttctatacaatagagtgcctctctgtccagaagtcaatccaagaagtgcttaatgggttcctttattctttcttcctggattactccttgctgagtggagacttctcaccaggactccagcattaccatttcctgtccatggagcatcctgagacaaattctgcgatctgatttccatcctgtctcacagaaaagtgcaatcctggtctctccagcatcttccctagttacccaggacaacacatcgagaattaaaagctttcttaaatttctctttgccccacccatgatcattccgcacaaatttcttgctcttgcagtgcaataaatgattacccttgcactt

SEQ ID NO: 295 - protein, 179 aa, Rattus norvegicus
MKLLLLLLCLGLTLVCGHAEEASFERGNLDVDKLNGDWFSIVVASDKREKIEENGSMRVFVQHIDVLENSLGFTFRIKENGVCTEFSLVADKTAKDGEYFVEYDGENTFTILKTDYDNYVMFHLVNVNNGETFQLMELYGRTKDLSSDIKEKFAKLCVAHGITRDNIIDLTKTDRCLQA

SEQ ID NO: 296 - DNA, 1003 bp, Rattus norvegicus
  CDS (59)..(604)
tgggcaccatcagcagagagattgtcccgacagagaggcaattctattccctaccaacatgaagctgttgctgctgctgctgtgtctgggcctgaccctggtctgtggccatgcagaagaagctagtttcgagagagggaacctcgatgtggacaagctcaatggggattggttttctattgtcgtggcctctgataaaagagaaaagatagaagagaacggcagcatgagagtttttgtgcagcacatcgatgtcttggagaattccttaggcttcacgttccgtattaaggaaaatggagtgtgcacagaattttctttggttgccgacaaaacagcaaaggatggcgaatattttgttgagtatgacggagaaaatacatttactatactgaagacagactatgacaattatgtcatgtttcatctcgttaatgtcaacaacggggaaacattccagctgatggagctctacggcagaacaaaggatctgagttcagacatcaaggaaaagtttgcaaaactatgtgtggcacatggaatcactagggacaatatcattgacctaaccaagactgatcgctgtctccaggcccgaggttgaagaaaggcctgagcctccagattgcagggcaagatctatttcttcatcctttgttctatacaatagagtgcctctctgtccagaagtcaatccaagaagtgcttaatgggttcctttattctttcttcctggattactccgtgctgagtggagacttctcaccaggactccagcattaccatttcctgtccatggagcatcctgagacaaattctgcgatctgatttccatcctgtctcacagaaaagtgcaatcctggtctctccagcatcttccctagttacccaggacaacacatcgagaattaaaagctttcttaaatttctctttgccccactcatgatcattccgcacaaatttcttgctcttgcagtgcaataaatgattacccttgcactt

SEQ ID NO: 297 - protein, 181 aa, Rattus norvegicus
MKLLLLLLCLGLTLVCGHAEEASFERGNLDVDKLNGDWFSIVVASDKREKIEENGSMRVFVQHIDVLENSLGFTFRIKENGVCTEFSLVADKTAKDGEYFVEYDGENTFTILKTDYDNYVMFHLVNVNNGETFQLMELYGRTKDLSSDIKEKFAKLCVAHGITRDNIIDLTKTDRCLQARG

SEQ ID NO: 298 - DNA, 361 bp, Rattus norvegicus
ttctctttttgcaccaacaggatgaaaccaaaggagactatgaaaaaatcctggtggctctgtgtggaggaaactaaacatcccaactgctctgtaagattccgaggagaacatctcttagccgttgttttcttcctattgcaaggcttaagtaggaaagttgctttgtcagtaagtctaattaccttctttgaataatgtagcctataaatatgttttagatcattcctctgtacaatagagaaatacttgttttgttaattatgtttatcccaaattataaatccctgtaagcaagtcatttggtaccattcctgagaaagaagtttacatagactaaaataaaacaattttataagac

SEQ ID NO: 299 - DNA, 1402 bp, Rattus norvegicus
  CDS (62)..(1102)
cgagcaaagcttctcttcagttccctggaagacaaggcaatacaaagatactttattaaaaatggcaatggtatcagaattcctcaagcaggcctgctatattgaaaagcaagagcaggaatatgttcaagctgtaaaatcctacaaaggtggtcctggatcagcagtgagcccctacccttccttcaatccgtcctcggatgttgctgccttgcacaaagctatcatggttaaaggtgtggatgaggcaaccatcattgacatccttaccaagagaaccaatgctcagcgccagcagatcaaggcagcatacttacaggagactgggaagcccctggatgaaaccttgaaaaaagcccttacgggccacctggaggaggttgttttggctatgctcaagaccccagctcagtttgatgcagatgaactccgtgctgccatgaagggacttggaacagatgaagacactctcattgagattttgacaacaagatctaaccagcaaatcagagagattactagagtctacagagaagagctgaaaagagatctggccaaagacatcacttcggacacatctggagactttcgtaatgccttgcttgctctcgccaagggtgatcgctgtgaggatatgagtgtgaatcaagatttggctgatacagatgccagggctttgtatgaagctggagaaaggagaaaggggacagacgtgaatgtgttcaatacaattttgaccacaagaagctatcctcatcttcggaaagtgtttcagaattatagaaagtacagtcaacatgacatgaacaaagccctggatctggaactgaagggtgacattgagaagtgcctcacaaccattgtgaagtgtgccaccagcactccagctttctttgctgagaaactgtatgaagccatgaagggtgctggaactcgccataagacattgatcaggattatggtctcccgttcggaaattgacatgaatgaaatcaaagtattttaccagaagaagtacggaatccctctctgccaagccatcctggatgaaaccaaaggagactatgaaaaaatcctggtggctctgtgtggaggaaactaaacatcccaactgctctgtaagattccgaggagaacatctcttagccgttgttttcttcctattgcaaggcttaagtaggaaagttgctttgtcagtaagtctaattaccttctttgaataatgtagcctataaatatgttttagatcattcatctgtacaatagagaaatacttgttttgttaattatgtttatcccaaattataaatccctgtaagcaagtcactttggtaccattcctgagaaagaagtttacatagaataaaataaaacaattttataagacaaaaaaaaaaaaaaa

SEQ ID NO: 300 - protein, 346 aa, Rattus norvegicus
MAMVSEFLKQACYIEKQEQEYVQAVKSYKGGPGSAVSPYPSFNPSSDVAALHKAIMVKGVDEATIIDILTKRTNAQRQQIKAAYLQETGKPLDETLKKALTGHLEEVVLAMLKTPAQFDADELRAAMKGLGTDEDTLIEILTTRSNQQIREITRVYREELKRDLAKDITSDTSGDFRNALLALAKGDRCEDMSVNQDLADTDARALYEAGERRKGTDVNVFNTILTTRSYPHLRKVFQNYRKYSQHDMNKALDLELKGDIEKCLTTIVKCATSTPAFFAEKLYEAMKGAGTRHKTLIRIMVSRSEIDMNEIKVFYQKKYGIPLCQAILDETKGDYEKILVALCGGN

SEQ ID NO: 301 - DNA, 1653 bp, Mus musculus
  CDS (23)..(1276)
tcgacctcacggtcttgccaaaatgtcgctttccaacaagctgactttggacaagctggacgtgaaggggaagcgggtcgtgatgagggtggacttcaacgttcctatgaagaacaaccagataacaaacaaccaaaggatcaaggctgctgttccaagcatcaaattctgcttggacaatggagccaactccgttgtccttatgagccacctgggccggcctgatggtgttcccatgcctgacaagtactccttagagccagttgctgctgaactcaaatctctgctgggcaaggatgttctgttcttgaaggattgtgtgggcccagaagtcgagaatgcctgtgccaacccagcggctgggactgtcatcctgctggaaaacctccgctttcatgtagaggaagaagggaagggaaaagatgcttctgggaacaaggttaaagctgagccggccaaaattgatgctttccgagcctcactgtccaaactaggagatgtctatgtcaatgatgcttttgggactgcacaccgagcccatagctccatggtgggtgtgaatctgccacagaaggctggtggatttttgatgaagaaggagctgaactactttgccaaggctttggagagtcctgagcgacccttcctggctatcttgggaggcgctaaagttgcagacaagatccagctgatcaataatatgctagacaaagtcaatgagatgatcattggtggtggaatggcctttaccttccttaaggtcctcaacaacatggagattggcacatctctgtatgatgaagaaggagccaagattgtcaaagatctcatgtccaaagctgagaaaaatggtgtgaagattaccttgcctgttgactttgtcactgctgacaaatttgatgagaatgccaagactggccaagctactgtggcctctggtatacctgctggctggatgggcttggactgtggtactgagagcagcaagaaatatgccgaggctgtgggtcgagctaagcagattgtttggaatggtcctgttggggtatttgaatgggaagcctttgccaggggaaccaagtcactcatggatgaggtggtgaaagccacttctaggggttgcatcactatcataggtggtggagacactgccacttgctgtgccaaatggaacacagaggataaagtcagccatgtgagcactgggggcggtgccagtctagagctcctggaaggtaaagtccttcctggggtggatgctctcagcaatgtttagtattttctttcctgcctttggttcctgtgctcctaagctaacctgctgttttccacatctccatttggtgttagcgcaagattcagctagtggctgagatgtggcacagaccttaacagtgcaagcatctcagctcgtcttactgcatcagatgctggttcttcaagatcccatttaaattccttagtgactaaaaccattgtgcattgtagagggcgtctatttatattctgcctgagaaaggaagtgagctgtaaaggctgagctctctctctgacgtatgtagcctctggttagcttcgtcactcactgttcttgactcagcatggcaatctgatgaaattcccagctgtaagtctgcagaaatttccgaattc

SEQ ID NO: 302 - protein, 417 aa, Mus musculus
MSLSNKLTLDKLDVKGKRVVMRVDFNVPMKNNQITNNQRIKAAVPSIKFCLDNGANSVVLMSHLGRPDGVPMPDKYSLEPVAAELKSLLGKDVLFLKDCVGPEVENACANPAAGTVILLENLRFHVEEEGKGKDASGNKVKAEPAKIDAFRASLSKLGDVYVNDAFGTAHRAHSSMVGVNLPQKAGGFLMKKELNYFAKALESPERPFLAILGGAKVADKIQLINNMLDKVNEMIIGGGMAFTFLKVLNNMEIGTSLYDEEGAKIVKDLMSKAEKNGVKITLPVDFVTADKFDENAKTGQATVASGIPAGWMGLDCGTESSKKYAEAVGRAKQIVWNGPVGVFEWEAFARGTKSLMDEVVKATSRGCITIIGGGDTATCCAKWNTEDKVSHVSTGGGASLELLEGKVLPGVDALSNV

SEQ ID NO: 303 - DNA, 1753 bp, Mus musculus
  CDS (56)..(1309)
aaagaattctcctcttcctcatctccgggcctttcgacctcacggtgttgccaaaatgtcgctttccaacaagctgactttggacaagctggacgtgaaggggaagcgggtcgtgatgagggtggacttcaacgttcctatgaagaacaaccagataacaaacaaccaaaggatcaaggctgctgttccaagcatcaaattctgcttggacaatggagccaactccgttgtccttatgagccacctgggccggcctgatggtgttcccatgcctgacaagtactccttagagccagttgctgctgaactcaaatctctgctgggcaaggatgttctgttcttgaaggattgtgtgggcccagaagtcgagaatgcctgtgccaacccagcggctgggactgtcatcctgctggaaaacctccgctttcatgtagaggaagaagggaagggaaaagatgcttctggaaacaaggttaaagctgagccggccaaaattgatgctttccgagcctcactgtccaaactaggagatgtctatgtcaatgatgcttttgggactgcacaccgagcccatagctccatggtgggtgtgaatctgccacagaaggctggtggatttttgatgaagaaggagctgaactactttgccaaggctttggagagtccagagcgacccttcctggctatcttgggaggcgctaaagttgcagacaagatccagctgatcaataatatgctagacaaagtcaatgagatgatcattggtggtggaatggcctttaccttccttaaggtgctcaacaacatggagattggcacatctctgtatgatgaagaaggagccaagattgtcaaagatctcatgtccaaagctgagaaaaatggtgtgaagattaccttgcctgttgactttgtcactgctgacaaatttgatgagaatgccaagactggccaagctactgtggcctctggtatacctgctggctggatgggcttggactgtggtactgagagcagcaagaaatatgccgaggctgtgggtcgagctaagcagattgtttggaatggtcctgttggggtatttgaatgggaagcctttgccaggggaaccaagtcactcatggatgaggtggtgaaagccacttctaggggttgcatcactatcataggtggtggagacactgccacttgctgtgccaaatggaacacagaggataaagtcagccatgtgagcactgggggcggtgccagtctagagctcctggaaggtaaagtccttcctggggtggatgctctcagcaatgtttagtattttctttcctgcctttggttcctgtgcacagctcctaagtcaacctagtgttttccacatctccatttggtgttagcgcaagattcagctagtggctgagatgtggcaccaggaacccttaaacagttgcacagcatctcagctcgtctttactgcatcaggatttgtctgtgttcttcaagatcccatttaaattccttagtgactaaaaccattgtgcattgtagagggcgtctatttatattctgcctgagaaaggaagtgagctgtaaaggctgagctctctctctgacgtatgtagcctctggttagcttcgtcactcactgttcttgactcagcatggcaatctgatgaaatcccagctgtaagtctgcagaaattgatgatctattaaacaataaagatgtccactaaaatggaaaaaaaaaaaaagaattctc

SEQ ID NO: 304 - protein, 417 aa, Mus musculus; identical to SEQ ID NO: 302

SEQ ID NO: 305 - DNA, 2039 bp, Mus musculus
  CDS (65)..(679)
tttggtgcgggagggagcgcgagaggcgggttcgagcctccggtgtcccaagctagaggtaagcatggcagaacaggaacccactgctgagcagcttgcgcagatagctgcagagaatgaggaagatgagcactctgtgaactacaagcctccagcccagaagagcatccaggagatccaggaactggacaaggacgatgaaagcctccgaaagtacaaggaggccctgctgggccgagtagctgtctctgcagaccccaacgtccccaatgtcattgtgactcgactgaccttggtatgcagcactgccccaggccctctggaactggacctgacaggtgatctggagagcttcaagaaacagtcgtttgtcttgaaggaaggtgtggagtaccggataaaaatctctttccgggtgaacagagagatcgtgtccggcatgaagtacatccaacacacatacaggaaaggggtcaaaattgacaagactgactacatggtcgggagctatgggccgagggcggaggagtatgagttcctgacacccatggaggaggctcccaaaggcatgcttgctcggggcagttacaacatcaagtcgcgcttcacagatgacgacaagactgaccacctgtcctgggagtggaatctcaccatcaaaaaggagtggaaggactgagctccagctgggagacgggcagggcgacggacagacagaaggaccgacatgccccaccctaaccccctacctaccccaaaccaaagtgctgacaggacctccctcacccgtcattcctccctagtccactcagactcgtcttgccgtctgtcaggattttaagtaagggctgtgtctttgtgggtcatcttcccatattcttccagccagaagtcgtgttgggaggatgctgggagtagggtcagcctgacttcccctttacattctgtctgctccctgcttagccctcgttttttctcattccttcgttctcttagagcagcccctattgttggctggcaagggaatttctggtgactgtagttccttagttaggtcttagcaatcaaaccaaatcaatgcccgtcagttcttctttgtgtacgtttgtgtttgtctgtgtgcgtgtgtgggggtgggtttggggtagaagggtgggaaggggcaggataagtggaatctctagggtgtatgggaagtagagggcagttagttctaagtgggcttttatgttccctgttgtgagggtgagaacaggttggtatcaaaccatccccctccccttagttcatcttgcttggacactgctttgccttgtggctgtctgttccctgggaaaggttttggaaggtcacccagaacaggatggccatactaacatctttcctggagttggatctgggaccaggtgactggtctctagtgggaagtgagaatggaagtgatggggtggagggctccttggaacaggtctgaagtatagcaatgacctctgggaggcaggaggtggagaaggctgactgggaggagattccagagaagagtgcaagggaaaccttgtctgtcggtgacatgattggggtgggtgggggttgtcattgccaattgagctgctgattcttatgaatcacattcagaactcgcatagggttgacactgtaaggggtggggaaatctagctatttttttttccccagcccattcttgggggtcggggggaggcaggagaatgccccttcctcctaagcccttcctgtgtgttgagcttttgtttttcttcagtgctggcaggggagggtgggaactggtggggactgagttccctgttcaaaccgttattgggtacaggattgaatgtttgattttaggttttatttttcttatgaatgtccagatctgtgtttccctgccctcccagactctggccagttggaagtgtctcgtttttgttcatctctcatttctggtgcagtgactgagaccctgccacatctatgctctgcatccacgcctcttttggacattaaaggtcgattgatgc

SEQ ID NO: 306 - protein, 204 aa, Mus musculus
MAEQEPTAEQLAQIAAENEEDEHSVNYKPPAQKSIQEIQELDKDDESLRKYKEALLGRVAVSADPNVPNVIVTRLTLVCSTAPGPLELDLTGDLESFKKQSFVLKEGVEYRIKISFRVNREIVSGMKYIQHTYRKGVKIDKTDYMVGSYGPRAEEYEFLTPMEEAPKGMLARGSYNIKSRFTDDDKTDHLSWEWNLTIKKEWKD

SEQ ID NO: 307 - DNA, 1099 bp, Mus musculus
  CDS (33)..(635)
cgccgactggagcctggaatagaacaatcaagatgacggagaaggatgcacagccacagctggaagaggcggacgacgacctggacagcaagctcaattataagccaccccctcagaagtccttgaaggagctgcaggagatggacaaggatgacgagagtctaaccaagtacaagaaaacactgctgggagatgtccctgtggtagcagacccaacagttcccaatgtgactgttacccggcttagccttgtatgtgacagtgcaccaggacccatcaccatggaccttactggggatctcgaggccctcaaaaaggatacatttgtgctaaaggaaggcattgaatacagggtgaaaattaacttcaaagtgaataaggatattgtgtctggcctgaagtatgttcaacacacataccggactggcatgagagtggataaagccacattcatggttggcagctatgggccccgaccagaggagtacgaattcctcactccagtagaggaagctcccaagggcatgctggcccgaggcacttaccacaacaagtccttcttcacggatgacgacaaacaggaccacctcacctgggaatggaacctggccattaagaaggattggacagaatgagtgcgtctgtccgtccctcctgtcaccttcctcacccaccagaagagttctcccgaccatgttgatcatcacaaactccctcctccctccctgttcctagctaggccctttctctgtcacacacacacacacacacatttcatcaccaatatgttttatcttaccccatctctcagagtgttccctgcaaatgagacttaaaaccctggcttctcccaccttgagtcctgaaggtcaagaaatgggcaagctccggctgacgcctccttggccttctgttcagaagtttattcttgccactgggttcttccggttcgatgaaccccgttgtcttctctgccaaggggagctctccttttgtgggagacactgtaaacaacaccaaaggaaaagaataaaatcgttgtgtgtgtgactgagaacctcatttgctttcctttgcccttaaataaatatggtaccag

SEQ ID NO: 308 - protein, 200 aa, Mus musculus
MTEKDAQPQLEEADDDLDSKLNYKPPPQKSLKELQEMDKDDESLTKYKKTLLGDVPVVADPTVPNVTVTRLSLVCDSAPGPITMDLTGDLEALKKDTFVLKEGIEYRVKINFKVNKDIVSGLKYVQHTYRTGMRVDKATFMVGSYGPRPEEYEFLTPVEEAPKGMLARGTYHNKSFFTDDDKQDHLTWEWNLAIKKDWTE

What is claimed is:

1) A method of treating an angiogenesis-mediated disorder in a subject in need thereof by administering a therapeutically effective amount of SEQ ID NOS 1-308 or a variant thereof.

2) The method of claim 1, wherein SEQ ID NO selected from the group consisting of 2, 4, 6, 8, 10, 12, 14, 16, 18, 20, 22, 24, 26, 28, 30, 32, 34, 36, 38, 40, 42, 44, 46, 48-80, 82, 84, 86, 88, 90, 92, 93, 95, 97, 99, 101, 103, 150, 107, 109, 111, 113, 115-133, 135-153, 155, 157, 159, 161, 163, 165, 167, 169-172, 174, 176, 178, 180, 182, 184-185, 187, 189, 191, 193, 194, 196, 197, 199, 201, 203, 205, 207, 209-211, 213, 215, 217, 219-236, 238, 285, 287, 289, 291, 293, 295, 297, 298, 300, 302, 304, 306 and 308.

3) The method of claim 1, wherein the angiogenesis mediated disorder comprises an angiogenesis elevated disorder.

4) The method of claim 3, wherein the angiogenesis elevated disorder is selected from diseases associated with retinal or choroidal neovascularization, and diseases associated with chronic inflammation.

5) The method of claim 1, wherein the angiogenesis mediated disorder comprises an angiogenesis reduced disorder.

6) The method claim 5, wherein the angiogenesis reduced disorder is selected from the group consisting of myocardial ischema, stroke, coronary artery disease, and peripheral vascular disease.

7) A method of screening an agent useful for treating an angiogenesis mediated disorder comprising the steps of: (a) exposing an angiogenesis modulating protein to the agent; and (b) measuring activity of angiogenesis modulating protein; wherein a modulation in the angiogenesis modulating protein activity indicates the agent is useful for treating the angiogenesis mediated disorder.

8) A method of screening an agent useful for treating an angiogenesis mediated disorder comprising the steps of: (a) exposing an angiogenesis modulating protein to the agent; (b) measuring binding of the agent to the angiogenesis modulating protein; wherein binding of the agent to the angiogenesis modulating protein indicates the agent is useful for treating the angiogenesis mediated disorder.

9) A method of screening an agent useful for treating an angiogenesis mediated disorder comprising the steps of: (a) exposing an angiogenesis modulating protein encoding nucleotide to the agent; (b) measuring the binding of the agent to the angiogenesis modulating protein encoding nucleotide; wherein binding of the agent to the angiogenesis modulating protein encoding nucleotide indicates the agent is useful for treating the angiogenesis mediated disorder.

10) A method of screening an agent useful for treating an angiogenesis mediated disorder comprising the steps of: (a) exposing a cell to the agent; and (b) measuring expression or activity of angiogenesis modulating protein in the cell; wherein a modulation in the expression or the activity of angiogenesis modulating protein indicates the agent is useful for the treatment of the angiogenesis mediated disorder.

11) A method of screening an agent useful for treating an angiogenesis mediated disorder comprising the steps of: (a) exposing a cell to the agent; and (b) measuring the association of the agent and angiogenesis modulating protein; wherein a modulation in the association of the agent and angiogenesis modulating protein indicates the agent is useful for the treatment of the angiogenesis mediated disorder.

12) The method of claim 7, 8, 9, 10, or 11, wherein the angiogenesis modulating protein is selected from the group consisting of SEQ ID NOS. 2, 4, 6, 8, 10, 12, 14, 16, 18, 20, 22, 24, 26, 28, 30, 32, 34, 36, 38, 40, 42, 44, 46, 48-80, 82, 84, 86, 88, 90, 92, 93, 95, 97, 99, 101, 103, 150, 107, 109, 111, 113, 115-133, 135-153, 155, 157, 159, 161, 163, 165, 167, 169-172, 174, 176, 178, 180, 182, 184-185, 187, 189, 191, 193, 194, 196, 197, 199, 201, 203, 205, 207, 209-211, 213, 215, 217, 219-236, 238, 240, 242, 244-258, 260, 262, 264, 265, 267, 269, 271, 273, 275, 277, 279, 281, 283, 285, 287, 289, 291, 293, 295, 297, 298, 300, 302, 304, 306 and 308

13) The composition of claim 9, wherein the agent is selected from the group consisting of peptide, peptidomimetic, polypeptide, protein, chemical compound, nucleotide, antibody, small molecule, vitamin derivative and carbohydrate.
